(19) United States
(12) Patent Application Publication
(10) Pub. No.: US 2021/0246454 A1
(43) Pub. Date: Aug. 12, 2021

(54) SPLICE MODULATING OLIGONUCLEOTIDES TARGETING RECEPTOR FOR ADVANCED GLYCATION END PRODUCTS AND METHODS OF USE

(71) Applicant: LifeSplice Pharma LLC, Malvern, PA (US)

(72) Inventors: Nicole M. LYKENS, Malvern, PA (US); Gordon J. LUTZ, Malvern, PA (US); Melanie K. TALLENT, Malvern, PA (US)

(21) Appl. No.: 17/056,368

(22) PCT Filed: May 17, 2019
(86) PCT No.: PCT/US2019/032974

§ 371 Date: Nov. 17, 2020

Related U.S. Application Data
(60) Provisional application No. 62/672,655, filed on May 17, 2018.

(51) Int. Cl. C12N 15/113; A01K 67/027; A61K 49/00

(52) U.S. Cl. CPC C12N 15/1138; A01K 67/0278; A01K 2267/03; A01K 2207/15; A01K 2227/105; A61K 49/0008

(57) ABSTRACT

The invention provides splice modulating oligonucleotides (SMOs) designed to modulate the splicing of a RAGE pre-mRNA, compositions including the SMOs, and methods of treating and preventing diseases and conditions using the SMOs and compositions.

### STATEMENT AS TO FEDERALLY FUNDED RESEARCH

[0001] This invention was made with government support under Grant No. 1R21AG060208-01 awarded by the National Institutes of Health. The government has certain rights in the invention.

### SEQUENCE LISTING

[0002] The instant application contains a Sequence Listing which has been submitted electronically in ASCII format and is hereby incorporated by reference in its entirety. Said ASCII copy, created on May 17, 2019 is named “50972-003WO2_Sequence_Listing_05.17.2019_ST25” and is 568.562 bytes in size.

### BACKGROUND

[0003] The human Receptor for Advanced Glycation End products (RAGE; AGER: HGNC #320) is a member of the immunoglobulin superfamily of receptors and is expressed on a wide array of cell types (Gray et al., Nuc. Acids Res. 41:D545-D552, 2013). In addition to being processed to form mRNA encoding full-length RAGE protein (flRAGE), RAGE pre-mRNA is extensively alternatively spliced, yielding splice variant mRNAs encoding RAGE proteins with altered amino acid compositions of the ligand binding domain or removal of the transmembrane region, with the latter class of variants encoding secreted, non-membrane bound forms of the receptor (sRAGE, e.g., RAGEv1; Park et al., Mol. Immunol. 40(16):1203-1211, 2004; Schlueter et al., Biochim. Biophys. Acta, 1630 (1):1-6, 2003; Yonekura et al., Biochem. J. 370(Pt 3):1097-1109, 2003).

[0004] RAGE recognizes 3-dimensional structures rather than specific amino acid sequences, providing for interactions with a diverse repertoire of ligands including, e.g., advanced glycation end products (AGEs), S100/calgranulins, high-mobility group box 1 (HMGB1), amyloid-β peptides (Hiwatashi et al., Ann. Surg. Oncol. 15(3):923-933, 2008), and MAC-1 (leukocyte integrin ITGAM; Chavakis et al., J. Exp. Med. 198(10):1507-1515, 2003; Yan et al., Expert. Rev. Mol. Med. 11 e9, 2009). Activation of RAGE affects several important signaling pathways which, in some instances, may target central transcription factors to regulate gene expression and/or play roles in immune regulation (see, e.g., Mahajan et al., Int. J. Cardiol., 2013). Accordingly, dysregulation (e.g., over-activation) of RAGE signaling is associated with a wide variety of diseases and conditions including, e.g., neurodegenerative, metabolic, cardiovascular, immunological, autoimmune, liver, and lung diseases, as well as cancer.

[0005] AGEs are RAGE ligands that are undesirable metabolic by-products from non-enzymatic glycoxidation of proteins and lipids (e.g., from natural aging, hyperglycemia, oxidative stress, and renal failure). The body manages AGEs through a natural clearance mechanism (e.g., binding to RAGEv1), but AGEs accumulate over time in a variety of tissues and are associated with changes in tissue/cell properties and organ dysfunction (Basta et al., Cardiovasc. Res. 63(4):582-592, 2004). In certain disease states, excessive AGE generation can overwhelm the clearance mechanisms, resulting in over-activating of RAGE, which leads to leading to damage to cells and organs. For example, binding of ligands (such as AGEs) to membrane bound RAGE activates damaging cellular responses including inflammatory signaling, transcriptional dysregulation, and oncogenic signaling. In contrast, sRAGE isoforms (e.g., RAGEv1) act as extracellular decoys by binding AGEs and other flRAGE ligands, greatly reducing their availability to trigger the aforementioned pathogenic signaling processes transduced by activated flRAGE. In addition to its decoy function to reduce flRAGE signaling, sRAGE (in particular synthetic sRAGE, or syn-sRAGE) was found to decrease the chronic inflammatory pain delayed hypersensitivity response in both wild type (WT) and RAGE knockout (KO) mice, indicating that sRAGE has effects via a mechanism that does not involve reduced membrane-bound RAGE signaling (Liliensiek et al., J. Clin. Invest., 113(11):1641-1650, 2004).

[0006] The diversity of diseases and conditions associated with RAGE (e.g., RAGE over-activation) makes RAGE a desirable therapeutic target.

### SUMMARY

[0007] The invention provides compositions and methods for treating a subject at risk of, susceptible to, or having a disease, disorder, or condition associated with RAGE mRNA expression or RAGE protein expression or function. In one embodiment, a RAGE mRNA may be an alternatively spliced, aberrantly spliced, overexpressed, or unwanted mRNA (e.g., a RAGE mRNA comprising the full length receptor or a membrane-bound isoform that encodes a protein that results in, causes, produces, or pre-disposes a subject to a disease or disorder). In another embodiment, splicing of a RAGE pre-mRNA is not a cause of a disease or disorder, but modulation of the splicing of the RAGE pre-mRNA reduces at least one symptom of the disease or disorder. In another embodiment, the invention provides methods of preventing or treating in a subject, a disease, disorder, or condition associated with RAGE pre-mRNA splicing, the methods comprising administering to the subject an SMO or composition described herein, or a vector or transgene encoding the same.

[0008] Accordingly, certain embodiments of the invention provide methods of treating or preventing a disease, disorder or condition in subject (e.g., a mammal, such as a human), comprising administering an SMO or composition described herein to the subject.

[0009] In certain embodiments, the SMO administration reduces expression of RAGE isoforms which have receptor signaling function. In certain embodiments, the SMO specifically binds to a RAGE pre-mRNA sequence, wherein when the SMO specifically binds to the RAGE pre-mRNA sequence, exon 9, intron 9, exon 10, or any combination thereof, in the resulting RAGE mRNA, and wherein the resulting mRNA encodes a RAGE protein. In certain embodiments, the RAGE protein has decoy receptor function.

[0010] Certain embodiments of the invention provide an SMO as described herein for the prophylactic or therapeutic treatment of a disease or disorder in a subject. Certain embodiments of the invention provide the use of an SMO as described herein to prepare a medicament for treating a disease or disorder in a subject. Certain embodiments of the invention provide an SMO as described herein for use in medical therapy. Certain embodiments of the invention provide an SMO as described herein for use in treating a disease or disorder.

[0011] The invention thus provides methods of modulating splicing of a Receptor for Advanced Glycation End products (RAGE) pre-mRNA. The methods include contacting a plurality of cells with a splice modulating oligonucleotide (SMO) that specifically binds to a complementary sequence of a pre-mRNA that undergoes splicing to form mRNA encoding a RAGE protein, wherein the SMO alters the relative amounts of mRNA encoding soluble and membrane bound isoforms of RAGE protein produced by the pre-mRNA splicing.

[0012] In some embodiments, the SMO increases the amount of mRNA encoding a soluble isoform of RAGE protein produced.

[0013] In some embodiments, the SMO decreases the amount of mRNA encoding a membrane bound isoform of RAGE protein.

[0014] In some embodiments, the SMO directs read-through of the 5′ splice site of exon 9 of the RAGE pre-mRNA, resulting in inclusion of part or all of intron 9, or exclusion of exon 10, or any combination thereof, in the RAGE pre-mRNA.

[0015] In some embodiments, the plurality of cells is in vitro, while in other embodiments plurality of cells is in vivo.

[0016] In some embodiments, the SMO specifically binds to a complementary sequence of RAGE pre-mRNA in at least one of the group consisting of an exon, an intron, a 5′ UTR, a 3′ UTR, a splice junction, an exon:exon splice junction, an exonic splicing silencer (ESS), an exonic splicing enhancer (ESE), an intronic splicing silencer (ISS), and/or an intronic splicing enhancer (ISE) or a combination of any of the aforementioned in the RAGE pre-mRNA.

[0017] In some embodiments, the SMO produces at least a 5 percent increase in read-through of the 5′ splice site of exon 9, resulting in inclusion of part or all of intron 9, or exclusion of exon 10, or any combination thereof, in a RAGE mRNA, as compared to baseline untreated cells, and alters expression of RAGE or one or more isoforms thereof.

[0018] In some embodiments, the plurality of cells are in vivo and the SMO is administered to a subject to treat a disease or condition selected from the group consisting of Alzheimer's disease, amyotrophic lateral sclerosis, diabetes, glucose tolerance, diabetic allodynia and neuropathy, diabetic retinopathy, atherosclerosis (e.g., coronary artery disease and peripheral artery disease), diabetic nephropathy, diabetic wound healing, cardiovascular disease, heart failure, ischemia-reperfusion injury, immunological disease, autoimmune disease (e.g., multiple sclerosis, osteoarthritis, and rheumatoid arthritis), sepsis, transplant rejection, cancer (e.g., glioma, breast cancer, liver cancer), pain, liver disease (e.g., hepatitis and liver fibrosis), and lung disease (e.g., acute airway injury and respiratory distress syndrome, chronic obstructive pulmonary disease, emphysema, asthma, cystic fibrosis, and idiopathic pulmonary fibrosis).

[0019] In some embodiments, the SMO used in a method described above is as described in the following paragraphs.

[0020] The invention also provides splice modulating oligonucleotides (SMOs) including, consisting essentially of, or consisting of 10 to 200 (e.g., 15 to 100, or 20 to 50) nucleotides that are complementary to an exonic or intronic sequence within exon 9, intron 9, or exon 10 of a RAGE pre-mRNA and an optional one or two additional nucleotides. The optional one or two additional nucleotides can be, for example, one or two additional nucleotides added at either or both ends of the SMO, and they can be any nucleotide. For example, they can be any of A, T/U, C, or G, or modified versions or analogs thereof, e.g., as described herein. As described elsewhere herein, the nucleotides of the SMOs can be modified at the base moiety, the sugar moiety, and/or the phosphate backbone.

[0021] In some embodiments, the SMO sequence includes or consists of one of SEQ ID NOs: 5 to 2897 or a variant thereof having at least 90% sequence identity to the reference sequence.

[0022] In some embodiments, the SMO sequence includes or consists of one of SEQ ID NOs. 5-2897.

[0023] In some embodiments, at least one nucleotide in the SMO includes one or more non-naturally occurring modifications including, e.g., at least one of a chemical composition of phosphorothioate 2′-O-methyl, phosphorothioate 2′-MOE, locked nucleic acid (LNA) including thiol-LNA, a constrained moiety, including a constrained ethyl nucleic acid (cEt) or constrained methoxyethyl (cMOE), peptide nucleic acid (PNA), phosphorodiamidate morpholino (PMO), cholesterol, GalNAc, or any combination thereof.

[0024] In some embodiments, at least one of the nucleotides of the SMO is a phosphorothioate 2′-O-methyl modified nucleotide.

[0025] The invention further provides pharmaceutical compositions including one or more SMO as described above or elsewhere herein.

[0026] The invention also provides methods of treating or preventing a disease or condition in a subject that would benefit from altered splicing of RAGE pre-mRNA. The methods include administering to the subject an SMO or composition as described above or elsewhere herein.

[0027] In some embodiments, the disease or condition is selected from the group consisting of Alzheimer's disease, amyotrophic lateral sclerosis, diabetes, glucose tolerance, diabetic allodynia and neuropathy, diabetic retinopathy, atherosclerosis (e.g., coronary artery disease and peripheral artery disease), diabetic nephropathy, diabetic wound healing, cardiovascular disease, heart failure, ischemia-reperfusion injury, immunological disease, autoimmune disease (e.g., multiple sclerosis, osteoarthritis, and rheumatoid arthritis), sepsis, transplant rejection, cancer (e.g., glioma, breast cancer, liver cancer), pain, liver disease (e.g., hepatitis and liver fibrosis), and lung disease (e.g., acute airway injury and respiratory distress syndrome, chronic obstructive pulmonary disease, emphysema, asthma, cystic fibrosis, and idiopathic pulmonary fibrosis).

[0028] The invention also provides a non-human animal (e.g., a mouse) including a gene encoding human RAGE.

[0029] In some embodiments, the gene encoding human RAGE has been introduced into the genome of the non-human animal.

[0030] In some embodiments, the gene encoding RAGE of the non-human animal has been edited out, knocked out, and/or replaced with the gene encoding human RAGE.

[0031] In some embodiments, the gene encoding human RAGE is a genomic sequence, encoding exons and introns.

[0032] In some embodiments, the gene encoding human RAGE is under control of the endogenous RAGE promoter of the non-human animal.

[0033] In some embodiments, the non-human animal includes a disease-related mutation. For example, the disease-related mutation may be is in a gene encoding presenilin, SOD1, or the cystic fibrosis membrane transporter (CFTR).

[0034] In some embodiments, the non-human animal is an inducible disease model. For example, the non-human animal may be an inducible disease model of a disease selected from the group consisting of Alzheimer's disease, amyotrophic lateral sclerosis, diabetes, glucose tolerance, diabetic allodynia and neuropathy, diabetic retinopathy, atherosclerosis, diabetic nephropathy, diabetic wound healing, cardiovascular disease, heart failure, ischemia-reperfusion injury, immunological disease, autoimmune disease, sepsis, transplant rejection, cancer, pain, liver disease, and lung disease, and optionally effects on physiology or disease are assessed.

[0035] The invention further provides methods for identifying or characterizing an SMO directed against human RAGE pre-mRNA, the methods including introducing an SMO into a non-human animal, e.g., as described above and elsewhere herein, and assessing the effects of the SMO on the non-human animal.

[0036] In some embodiments, effects on splicing of RAGE pre-mRNA are assessed.

[0037] In some embodiments, the non-human animal is a disease model and a feature of the disease is assessed.

[0038] In some embodiments, the SMO includes a sequence selected from SEQ ID NOs: 5-2897.

[0039] The invention also includes use of an SMO or composition as described herein for carrying out any of the methods described herein.

[0040] Other features and advantages of the invention will be apparent from the following detailed description, the drawings, and the claims.

### BRIEF DESCRIPTION OF THE DRAWINGS

[0041] For the purpose of illustrating the invention, there are depicted in the drawings certain embodiments of the invention. However, the invention is not limited to the precise arrangements and instrumentalities of the embodiments depicted in the drawings.

[0042] FIG. 1. Nomenclature and splicing patterns of RAGE isoforms found in human lung or aortic smooth muscle cells. The two most highly expressed isoforms are flRAGE (membrane-bound) and RAGEv1 (soluble). Splice isoforms v2, 3, 7-9, 11, 12, 14, 15, and 17 are potential targets of nonsense mediated decay, however, isoforms such as N-truncated RAGE (RAGEv3) are reported to make protein. Splicing patterns and correlative nomenclature as described previously (Hudson et al., FASEB J. 22(5):1572-1580, 2008).

[0043] FIG. 2. Conservation of sequence homology between major species: human, rat, and mouse. Alignment for the 27 nucleotide exon 9, 128 nucleotide intron 9, and 127 nucleotide exon 10 of human, with the 27 nucleotide exon 9, 117 nucleotide intron 9, and 127 nucleotide exon 10 of both rat and mouse sequences. The common flRAGE 5′ exon 9 and 3′ exon 10 splice sites are shown. Differences between human and rodent in alternate 5′ splice site location corresponding to generation of RAGEv1 (and other soluble RAGE isoforms) are also depicted.

[0044] FIG. 3. Splicing patterns of SMO-directed RAGE isoforms. A. Detailed splicing pattern of flRAGE (solid lines) and RAGEv1 (dashed lines). B. Other possible splicing patterns generated by SMO-mediated splicing which may or may not correspond to currently known natural splice variants. SMO generated transcripts may include RAGEv1, RAGEv6, RAGEv8, RAGEv9 RAGEv10, RAGEv13, RAGEv15, RAGEv18, RAGEv19. Additionally, read-through into intron 9 could still allow for inclusion of exon 10 (dot-dashed lines), but still produce a truncated soluble RAGE isoform or blocking of exon 10 inclusion with normal splicing at the exon 9 5′ splice site (dotted lines) could cause out of frame truncation of the RAGE protein resulting in either a soluble protein or a transcript that will be funneled to NMD.

[0045] FIGS. 4A-4L. RAGE Splicing SMOs. FIG. 4A. Human RAGE target sequences for increasing read-through into intron 9 and/or skipping of exon 10: Exon 9+Intron 9+Exon 10. FIG. 4B. RAGE 25 mer SMO sequences. FIG. 4C. RAGE 24 mer SMO sequences. FIG. 4D. RAGE 23 mer SMO sequences. FIG. 4E. RAGE 22 mer SMO sequences. FIG. 4F. RAGE 21 mer SMO sequences. FIG. 4G. RAGE 20 mer SMO sequences. FIG. 4H. RAGE 19 mer SMO sequences. FIG. 4I. RAGE 18 mer SMO sequences. FIG. 4J. RAGE 17 mer SMO sequences. FIG. 4K. RAGE 16 mer SMO sequences. FIG. 4L. RAGE 15 mer SMO sequences.

### DETAILED DESCRIPTION

[0046] The invention provides Splice Modifying Oligonucleotides (SMOs) that can be used to modulate the splicing of pre-mRNA encoding the Receptor for Advanced Glycation End products (RAGE). The SMOs of the invention can, for example, direct RAGE pre-mRNA splicing to (i) increase the generation of mRNA encoding soluble RAGE (sRAGE), (ii) decrease the generation of mRNA encoding full-length RAGE (flRAGE), or (iii) both increase the generation of mRNA encoding sRAGE and decrease the generation of mRNA encoding flRAGE. As noted above, over-activation of RAGE is associated with a number of different diseases and conditions. In addition, sRAGE can beneficially act as a decoy for RAGE ligands, and thus decrease signal transduction through RAGE. Accordingly, the SMOs of the invention can be used in methods for the treatment and prevention of diseases and conditions characterized by, e.g., over-activation of RAGE. The SMOs, compositions, and methods of the invention are described further, below, after a brief description of splicing of RAGE pre-mRNA.

[0047] The term “sRAGE” is used throughout to denote all soluble isoforms of the RAGE receptor as a group. The term “syn-sRAGE” denotes a synthetic soluble protein that may be of identical amino acid composition to any soluble RAGE isoforms, particularly RAGEv1. The term “mbRAGE” denotes membrane-bound RAGE, while “flRAGE” denotes full-length RAGE. The term “RAGE” is used in the most general way, where the type of RAGE (e.g., membrane-bound or soluble) can be inferred from the context in which it is used.

Splicing of RAGE pre-mRNA

[0048] As a basis for understanding how to modulate splicing of RAGE pre-mRNA, a description of certain aspects of alternative splicing of RAGE pre-mRNA follows.

[0049] The most abundant RAGE transcript is the full-length mRNA isoform (“flRAGE”) (NM_001136.4; NP_01127.1), and contains 11 exons, a 5′ untranslated region (UTR), and a short 3′ UTR. The flRAGE transcript is translated into a protein of 404 amino acids (aa), which includes (i) an extracellular region (aa 1-342) comprised of a signal peptide (aa 1-22) and three immunoglobulin (Ig)-like domains, including a V-type domain and partial ligand binding site (aa 23-116) and two C2-type 1/2 domains (aa 124-221 and 227-317); (ii) a single transmembrane domain (aa 343-363); and (iii) a short cytoplasmic tail (aa 364-404) (Neeper et al., J. Biol. Chem. 267(21):14998-15004, 1992). flRAGE is the only RAGE isoform capable of binding all RAGE ligands. The second most prevalent RAGE isoform is a naturally alternatively spliced variant RAGEv1 (also called esRAGE or sRAGE; NM_001206940.1; NP_001193869.1).

[0050] The mRNAs of flRAGE and RAGEv1 are identical from exon 1 to the end of exon 9. However, RAGEv1 uses an alternate splice site at the exon 9/intron 9 boundary, which facilitates alternative inclusion of the first 82 nucleotides (nt) of intron 9, skipping of exon 10, and inclusion of exon 11, which contains a polyadenylation sequence (Yonekura et al., Biochem. J. 370(Pt 3):1097-1109, 2003). An “in frame” UGA stop codon at positions 51-53 of intron 9 terminates the coding sequence of RAGEv1. By the alternative inclusion of part of intron 9 in the coding sequence and the premature stop codon, the RAGEv1 protein sequence diverges from flRAGE at amino acid 332, followed by 15 unique amino acids, yielding a truncated protein isoform of 347 amino acids that lacks both the transmembrane domain and cytosolic tail of the 404 amino acid flRAGE (Chuah et al., Int. J. Inflam. 403-460, 2013). Thus, the RAGEv1 isoform can act as a soluble decoy receptor, binding to and clearing ligands from the circulation without activating cell signaling pathways normally associated with ligand binding (Ohe et al., J. Biochem. 147(5):651-659, 2010).

[0051] Additional splice isoforms of both membrane-bound and soluble RAGE (generally sRAGE) have been detected (FIG. 1), but all at much lower levels than flRAGE and RAGEv1. For example, RAGEv10 (NM_001206966.1; NP_001193895.1) is a soluble isoform with the same mRNA and resultant protein as RAGEv1, differing only by a shorter 3′ UTR. Also, there are several C-truncated soluble forms of RAGE that arise by post-translational proteolytic cleavage of flRAGE by MMP-9 or ADAM10 metalloproteinase (Chuah et al., Int. J. Inflam. 403-460, 2013; Mahajan et al., Int. J. Cardiol. 2013; Zhang et al., J. Biol. Chem. 283(51):35507-35516, 2008). As is the case for RAGEv1 and RAGEv10, all of the cleaved soluble RAGE isoforms are thought to facilitate the clearance or detoxification of a wide array of ligands associated with human diseases.

### Splice Modulating Oligonucleotides (SMOs)

[0052] SMOs are a type antisense oligonucleotide which, when engineered with a particular sequence of the proper chemistry, will bind to a complementary sequence within transcribed pre-mRNA of a target gene and sterically block or weaken interactions between elements of the spliceosome and the pre-mRNA. This results in modulation of the resultant mRNA sequences at a quantitative and/or qualitative level.

[0053] Accordingly, an SMO of the invention may be defined generally as a nucleotide sequence (or oligonucleotide), a portion of which is capable of hybridizing with a target nucleic acid to exact an antisense activity on the target nucleic acid. Alternatively, an SMO of the invention can be defined functionally as a nucleotide sequence (or oligonucleotide), at least a portion of which is complementary to and capable of hybridizing with a target nucleic acid sequence (e.g., a RAGE pre-mRNA) to exact a splice modulation in the target RNA of at least, e.g., 5%, 10%, 20%, 30%, 40%, 50%, 75%, 90%, or 100% for a given subject as measured by target RNA levels.

[0054] With respect to the SMOs of the invention, the term “splice modulation” refers to molecular manipulation of pre-mRNA splicing to direct a change in the final composition of the mRNA transcript. It is appreciated that complementarity to the target pre-mRNA alone may not be sufficient to produce a functional SMO. The location of SMO binding (e.g., a splicing motif in the pre-mRNA) and thermodynamics of binding at that site, as well as secondary structure of the pre-mRNA or SMO, are among the factors that determine whether splice modulation occurs and the magnitude thereof.

[0055] Sequences that can be targeted by SMOs can be selected by those of skill in the art and include, for example, a complementary sequence on a pre-mRNA at an exon or intron splice suppressor or splice enhancer site, at an intron-exon splice site (5′ or 3′), or at a variety of sites on the pre-mRNA containing various other motifs that affect splicing. For example, when an SMO specifically binds to a splice enhancer site, or an intron-exon splice site, the adjacent exon may be excluded from the resulting mRNA. Additionally, an SMO may specifically bind to a splice suppressor site or an intron-exon site, and the adjacent exon may be included in the resulting mRNA. An SMO may further specifically bind to a splice enhancer site or an intron-exon splice site and shift the reading frame of the pre-mRNA so that the resulting protein is truncated. In some cases, the resulting protein is a limited-function or non-functional protein. The location of an exonic or intronic splice enhancer or suppressor motif may be found anywhere within the exon and the flanking introns. Similarly, an SMO may either fully or partially overlap an exonic or intronic splice enhancer or suppressor site in proximity to an intron-exon boundary and/or be complementary to the 3′ or 5′ splice sites.

[0056] The sequences of the SMOs of the invention can be described in terms of their relationship to the target pre-mRNA sequences to which they hybridize, and thus to which they are complementary. In a related manner, they can also be described with respect to variant SMO sequences with which they have a given level of sequence identity.

[0057] A target RNA (e.g., pre-mRNA, such as RAGE pre-mRNA) splice-modifying interaction guided by oligonucleotides of the invention is highly sequence specific. In general, oligonucleotides having 100% complementarity to a portion of the target pre-mRNA are exposed to target pre-mRNA for blocking of sequence elements within the target pre-mRNA. However, it is appreciated that 100% sequence complementarity between the oligonucleotide and the target pre-mRNA is not required to practice the present invention. Thus, sequence variations that might be expected due to genetic mutation, wobble base pairing, strain polymorphism, or evolutionary divergence may be tolerated. In wobble base pairing, non-Watson-Crick nucleotide pairing occurs in which U can pair with both A and G, so A can be substituted with G, and inosine (I) can pair with any base. For example, oligonucleotide sequences with insertions, deletions, and single point mutations relative to the target sequence may also be effective for SMO-mediated effect on pre-mRNA splicing. Alternatively, oligonucleotide sequences with nucleotide analog substitutions or insertions can be effective for splice modulation. Greater than 60% sequence identity (or complementarity), e.g., greater than 65%, 70%, 71%, 72%, 73%, 74%, 75%, 76%, 77%, 78%, 79%, 80%, 81%, 82%, 83%, 84%, 85%, 86%, 87%, 88%, 89%, 90%, 91%, 92%, 93%, 94%, 95%, 96%, 97%, 98%, 99% or even 100% sequence identity, and any and all whole or partial increments there between the oligonucleotide and the target RNA, e.g., target pre-mRNA, may be preferred.

[0058] Incorporation of nucleotide affinity modifications can allow for a greater number of mismatches compared to an unmodified compound. Certain SMO sequences may be more tolerant to mismatches than other oligonucleotide sequences. Those of ordinary skill in the art can determine an appropriate number of mismatches between oligonucleotides, between an SMO and a target nucleic acid, such as by determining melting temperature (Tm) and evaluating the effect of chemical modifications on the Tm and hybridization stringency (Freier et al., Nucleic Acids Research 25, 22:4429-4443, 1997).

[0059] With respect to an SMO of the invention, the term “hybridize” or “hybridizing” refers to the association between two single-stranded nucleotide molecules of sufficiently complementary sequences to permit such hybridization under pre-determined conditions generally used in the art (including, e.g., physiological conditions). In particular, the term refers to hybridization of an SMO with a substantially complementary sequence contained within a complementary sequence of a target complementary sequence of the RAGE pre-mRNA molecule, to the substantial exclusion of hybridization of the SMO with a pre-mRNA that has a non-complementary sequence. Appropriate conditions enabling specific hybridization of single stranded nucleic acid molecules of varying complementarity are well known in the art. It is appreciated that these conditions are largely dictated by cellular conditions for in vivo applications.

[0060] With respect to the SMOs of the invention, the term “complementary” or “complementarity” refers to a degree of antiparallel relationship between a strand of SMO and a pre-mRNA molecule. In some instances, the complementarity between an SMO of the invention and a pre-mRNA is between 60% and 100%, e.g., at least 60%, 65%, 70%, 75%, 80%, 85%, 90%, 91%, 92%, 93%, 94%, 95%, 96%, 97%, 98%, 99%, or 100%.

[0061] Further, with respect to SMO variants of the invention, the term “sequence identity” or “identity” in the context of two nucleic acid sequences (e.g., an SMO and a variant thereof) makes reference to a specified percentage of residues in the two sequences that are the same when aligned by sequence comparison algorithms or by visual inspection. For example, sequence identity may be used to reference a specified percentage of residues that are the same across the entirety of the two sequences when aligned. In certain embodiments, the term “substantial identity” of polynucleotide sequences means that a polynucleotide includes a sequence that has at least 60%, 65%, 70%, 71%, 72%, 73%, 74%, 75%, 76%, 77%, 78%, or 79%; at least 80%, 81%, 82%, 83%, 84%, 85%, 86%, 87%, 88%, or 89%; at least 90%, 91%, 92%, 93%, or 94%; or even at least 95%, 96%, 97%, 98%, or 99% sequence identity, compared to a reference sequence using one of the alignment programs described using standard parameters.

[0062] Sequence identity, including determination of sequence complementarity or homology for nucleic acid sequences, can be determined by sequence comparison and alignment algorithms known in the art. To determine the percent identity of two nucleic acid sequences (or of two amino acid sequences), the sequences are aligned for optimal comparison purposes (e.g., gaps can be introduced in the first sequence or second sequence for optimal alignment). The nucleotides (or amino acid residues) at corresponding nucleotide (or amino acid) positions are then compared. When a position in the first sequence is occupied by the same residue as the corresponding position in the second sequence, then the molecules are identical at that position. The percent identity between the two sequences is a function of the number of identical positions shared by the sequences (i.e., % homology=number of identical positions/total number of positions×100), optionally penalizing the score for the number of gaps introduced and/or length of gaps introduced. The comparison of sequences and determination of percent identity between two sequences can be accomplished using a mathematical algorithm. In one embodiment, the alignment generated over a certain portion of the sequence aligned having sufficient identity but not over portions having low degree of identity (i.e., a local alignment). A non-limiting example of a local alignment algorithm utilized for the comparison of sequences is the algorithm of Karlin and Altschul, Proc. Natl. Acad. Sci. U.S.A. 87:2264-68, 19990, modified as in Karlin and Altschul, Proc. Natl. Acad. Sci. U.S.A. 90:5873-77, 1993. Such an algorithm is incorporated into the BLAST programs (version 2.0) of Altschul et al., J. Mol. Biol. 215:403-410, 1990.

[0063] In another embodiment, the alignment is optimized by introducing appropriate gaps and percent identity is determined over the length of the aligned sequences (i.e., a gapped alignment). To obtain gapped alignments for comparison purposes, Gapped BLAST can be utilized as described in Altschul et al., Nucleic Acids Res. 25(17):3389-3402, 1997. In another embodiment, the alignment is optimized by introducing appropriate gaps and percent identity is determined over the entire length of the sequences aligned (i.e., a global alignment). A non-limiting example of a mathematical algorithm utilized for the global comparison of sequences is the algorithm of Myers and Miller, CABIOS (1989). Such an algorithm is incorporated into the ALIGN program (version 2.0) which is part of the GCG sequence alignment software package. When utilizing the ALIGN program for comparing amino acid sequences, a PAM 120 weight residue table, a gap length penalty of 12, and a gap penalty of 4 can be used.

[0064] In another embodiment, the sequence identity for two sequences is based on the greatest number of consecutive identical nucleotides between the two sequences (without inserting gaps). For example, the percent sequence identity between Sequence A and B below would be 87.5% (Sequence B is 14/16 identical to Sequence A), whereas the percent sequence identity between Sequence A and C would be 37.25% (Sequence C is 6/16 identical to Sequence A).

Example Sequence A:
(SEQ ID NO: 2898)
GCATGCATGCATGCAT
Example Sequence B:
(SEQ ID NO: 2899)
GCATGCATGCATGC
Example Sequence C:
(SEQ ID NO: 2900)
GCATTTGCAGCAGC

[0065] As used herein, a sequence is identical to an SMO sequence disclosed herein if it has the same nucleobase pairing ability. This identity may be over the entire length of the nucleotide sequence, or in a portion of the nucleotide sequence, e.g., nucleobases 1-20 of a 300-mer may be compared to a 20-mer to determine percent identity of the nucleic acid to the SEQ ID NO described herein. Percent identity is calculated according to the number of nucleotide bases that have identical base pairing corresponding to the SEQ ID NO or SMO compound to which it is being compared. The non-identical bases may be adjacent to each other, dispersed throughout the nucleotide sequence, or both. For example, an 18-mer having the same sequence as nucleobases 3-20 of a 24-mer SMO is 75% identical to the 24-mer SMO. Alternatively, a 24-mer containing six nucleobases not identical to another 24-mer is also 75% identical to the 24-mer. Similarly a 15-mer having the same sequence as nucleobases 1-15 of a 100-mer is 15% identical to the 100-mer. Such calculations are well within the ability of those skilled in the art.

[0066] It is further understood by those skilled in the art that a nucleic acid sequence need not have an identical sequence to those described herein to function similarly to the SMO compound described herein. Shortened versions of SMO compounds taught herein, or non-identical versions of the SMO compounds taught herein, are also provided. Non-identical versions can include at least one base replaced with a different base with different pairing activity (e.g., G can be replaced by C, A, or T), wobble base pairing, or sequences are those wherein each base does not have the same pairing activity (e.g., by the nucleic acid sequence being shorter or having at least one abasic site) as the SMOs disclosed herein.

[0067] SMOs of the invention are typically about, for example, 10-200 nucleotides long (e.g., 12-175, 14-150, 15-125, 20-100, or 25-75). In specific examples, the SMO sequence is 14 to about 26 nucleotides long (e.g., about 14, 15, 16, 17, 18, 19, 20, 21, 22, 23, 24, 25, or 26 nucleotides long). In some instances, only a portion of an SMO hybridizes to the pre-mRNA, and that portion has the requisite level of complementarity to support hybridization of the SMO to the pre-mRNA. Thus, for example, a portion of an SMO that hybridizes to pre-mRNA may comprise, e.g., about 12-100 nucleotides, while the SMO molecule itself may comprise additional nucleotides, e.g., 1-100, 2-80, 3-70, 4-60, 5-50, 6-40, 7-30, 8-20, or 10-15 additional nucleotides.

[0068] Specifically in regard to RAGE pre-mRNA, SMOs targeting RAGE pre-mRNA sequences are complementary to the RAGE pre-mRNA sequences, such that they bind to the target sequences sufficiently to block or otherwise alter a splicing event, as described herein.

[0069] In various examples, the invention provides “dual mechanism” SMOs that simultaneously (i) reduce the expression of a membrane-bound RAGE protein (e.g., flRAGE), and (ii) increase the expression of a secreted sRAGE protein (e.g., RAGEv1), which can act as a decoy by binding ligands (e.g., AGEs) of membrane bound active RAGE isoforms, but is not capable of transducing deleterious ligand-RAGE signaling events. In these examples, the SMO-mediated increase in ligand-sRAGE binding can greatly decrease the deleterious RAGE ligands from stimulating pathological RAGE signaling, not only by binding them, but also by ridding them from circulation. The invention also provides “single mechanism” SMOs with properties to reduce the expression of a membrane-bound RAGE protein (e.g., flRAGE), or increase the expression of a secreted sRAGE protein (e.g., RAGEv1), which can act as a decoy by binding ligands (predominantly AGEs) of membrane bound active RAGE isoforms, but is not capable of transducing deleterious ligand-RAGE signaling events.

[0070] Accordingly, in various examples, certain SMOs of the invention can be used to increase the generation of mRNA encoding sRAGE (e.g., RAGEv1), relative to the amount of flRAGE mRNA produced. As noted above, a single exon 9-intron 9 splicing event can determine whether flRAGE or an sRAGE (i.e., RAGEv1) mRNA is produced. Accordingly, SMOs directed at this particular splicing event can be used, for example, to decrease flRAGE and/or to increase sRAGE (e.g., RAGEv1) expression. By controlling alternative splicing of the RAGE transcript, receptor binding, signaling properties, and ligand clearance, can be regulated rather than simply downregulating or antagonizing the RAGE receptor. SMOs can be designed based on, e.g., the consensus sequence of RAGE (AGER: HGNC #320, OMIM: 600214; Genbank KR711244.1), including upstream and downstream nucleotides (see, e.g., FIG. 2).

[0071] In certain embodiments, the SMO comprises a sequence designed to modulate the splicing of exon/intron 9 in the RAGE pre-mRNA. In certain embodiments, the SMO comprises a sequence designed to include a portion of intron 9 in a resulting RAGE mRNA. In certain embodiments, the SMO comprises a sequence designed to exclude exon 10 in a resulting RAGE mRNA. In certain embodiments, the SMO comprises a sequence that specifically binds to a 3′ or 5′ splice site of 9. In certain embodiments, the SMO comprises a sequence that specifically binds to an exon 9 exonic splice enhancer (ESE) sequence. In certain embodiments, the SMO comprises a sequence that specifically binds to an exon 9 intronic splice enhancer (ISE) sequence. In certain embodiments, the SMO comprises a sequence that specifically binds to an exon 9 intronic splice silencer (ISS) sequence. In certain embodiments, the SMO comprises a sequence that specifically binds to an exon 9 exonic splice silencer (ESS) sequence. In certain embodiments, the SMO comprises a sequence that specifically binds to exon 9 of the RAGE pre-mRNA (e.g., binds to a complementary sequence in exon 9 (either partially or wholly within exon9)).

[0072] In certain embodiments, the SMO comprises a sequence that has at least about 60% complementarity with a sequence of one of SEQ ID NOs: 1-4. In certain embodiments, the sequence has at least about 60, 65, 70, 75, 80, 81, 82, 83, 84, 85, 86, 87, 88, 89, 90, 91, 92, 93, 94, 95, 96, 97, 98, 99, or 100% complementarity with a sequence of one of SEQ ID NOs: 1-4.

[0073] In some embodiments, the SMO sequence is about 10-200 nucleotides long (e.g., 12-175, 14-150, 15-125, 20-100, or 25-75 nucleotides long). For example, the SMO sequence may be about 14, 15, 16, 17, 18, 19, 20, 21, 22, 23, 24, 25 or 26 nucleotides long. In certain embodiments, the SMO is about 15 to about 26 nucleotides long.

[0074] In certain embodiments, the SMO comprises or consists of about 14 to about 26 nucleotides, and comprises or consists of between about 6 and 24 contiguous nucleotides (i.e., about 6, 7, 8, 9, 10, 11, 12, 13, 14, 15, 16, 17, 18, 19, 20, 21, 22, 23 or 24 contiguous nucleotides) of any one of SEQ ID NOs: 5-2897. In certain embodiments, the SMO comprises between about 10 to about 24 contiguous nucleotides of any one of SEQ ID NOs: 5-2897. In certain embodiments, the SMO comprises about 11, 12, 13, 14, 15, 16, 17, 18, 19, 20, 21, 22, 23 or 24 contiguous nucleotides of any one of SEQ ID NOs: 5-2897.

[0075] In certain embodiments, the SMO comprises a sequence that has at least 60% sequence identity with any one of SEQ ID NOs: 5-2897. In certain embodiments, the sequence has at least 65, 70, 75, 80, 81, 82, 83, 84, 85, 86, 87, 88, 89, 90, 91, 92, 93, 94, 95, 96, 97, 98, 99 or 100% sequence identity with any one of SEQ ID NOs: 5-2897. In certain embodiments, the sequence is selected from any one of SEQ ID NOs: 5-2897.

[0076] Certain embodiments of the invention provide a composition comprising an SMO described herein. In certain embodiments, the composition is a pharmaceutical composition. In certain embodiments, the pharmaceutical composition comprises a pharmaceutically acceptable carrier.

### Synthesis of SMOs

[0077] Oligonucleotides of the invention (e.g., SMOs) can be synthesized using procedures known in the art including, e.g., chemical synthesis, enzymatic ligation, organic synthesis, and biological synthesis. In one example, an RNA molecule, e.g., an SMO, is prepared chemically (see, e.g., Verma and Eckstein, Ann. Rev. Biochem. 67:99-134, 1998). RNA can optionally be purified from a mixture by extraction with a solvent or resin, precipitation, electrophoresis, chromatography, or a combination thereof. Alternatively, the RNA may be used with no or a minimum of purification to avoid losses due to sample processing.

### Modifications of SMOs

[0078] Oligonucleotides of the invention (e.g., SMOs) can be modified to improve stability in serum or growth medium for cell cultures, or otherwise to enhance stability during delivery to subjects and/or cell cultures.

[0079] In order to enhance stability, 3′-residues can be stabilized against degradation, e.g., they can be selected such that they consist of purine nucleotides, particularly adenosine or guanosine nucleotides. Alternatively, substitution of pyrimidine nucleotides by modified analogues, e.g., substitution of uridine by 2′-deoxythymidine, or cytosine by 5′-methylcytosine, can be tolerated without affecting the efficiency of oligonucleotide reagent-induced modulation of splice site selection. For example, the absence of a 2′ hydroxyl may significantly enhance the nuclease resistance of the oligonucleotides.

[0080] The SMOs can include one or more modified nucleotide analogue, which may optionally be located at a position(s) that does not substantially affect target-specific activity, e.g., the splice site selection modulating activity is not substantially affected, e.g., in a region at the 5′-end and/or the 3′-end of the SMO molecule. In particular examples, the ends are stabilized by the incorporation of one or more modified nucleotide analogue.

[0081] Exemplary nucleotide analogues that can be included in the SMOs are sugar- and/or backbone-modified ribonucleotides. For example, the phosphodiester linkages of natural RNA can be modified to include at least one of a nitrogen or sulfur heteroatom. In certain examples of backbone-modified ribonucleotides, the phosphoester group connecting to adjacent ribonucleotides is replaced by a modified group, e.g., of phosphothioate group. Thus, in various examples, in sugar-modified ribonucleotides, the 2′ OH-group is replaced by a group selected from: CH₃, CH₂CH₂OCH₃, H, OR, R, halo, SH, SR, NH₂, NHR, NR₂, or ON, wherein R is C₁-C₆ alkyl, alkenyl or alkynyl and halo is F, Cl, Br, or I.

[0082] Other examples include nucleobase-modified ribonucleotides containing at least one non-naturally occurring nucleobase instead of a naturally occurring nucleobase. Bases may be modified, for example, to block the activity of adenosine deaminase. Exemplary modified nucleobases include, for example, phosphorothioate derivatives and acridine substituted nucleotides, 2′-O-methyl substitutions, 2′-O-(2methoxyethyl) substitutions 5-fluorouracil, 5-bromouracil, 5-chlorouracil, 5-iodouracil, hypoxanthine, xanthine, 4-acetylcytosine, 5-(carboxyhydroxylmethyl)uracil, 5-carboxymethylaminomethyl-2-thiouridine, 5-carboxymethylaminomethyluracil, dihydrouracil, beta-D-galactosylqueosine, inosine, N6-isopentenyladenine, 1-methylguanine, 1-methylinosine, 2,2-dimethylguanine, 2-methyladenine, 2-methylguanine, 3-methylcytosine, 5-methylcytosine, N6-adenine, 7-methylguanine, 5-methylaminomethyluracil, 5-methoxyaminomethyl-2-thiouracil, beta-D-mannosylqueosine, 5′-methoxycarboxymethyluraci I₅ 5-methoxyuracil, 2-methylthio-N6-isopentenyladenine, uracil-5-oxyacetic acid (v), wybutoxosine, pseudouracil, queosine, 2-thiocytosine, 5-methyl-2-thiouracil, 2-thiouracil, 4-thiouracil, 5-methyluracil, uracil-5-oxyacetic acid methylester, uracil-5-oxyacetic acid (v), 5-methyl-2-thiouracil, 3-(3-amino-3-N-2-carboxypropyl) uracil, (acp3)w, and 2,6-diaminopurine, uridine and/or cytidine modified at the 5-position, e.g., 5-(2-amino)propyl uridine, 5-bromo uridine; adenosine and/or guanosines modified at the 8 position, e.g., 8-bromo guanosine; deaza nucleotides, e.g., 7-deaza-adenosine; 0- and N-alkylated nucleotides, e.g., N6-methyl adenosine. It should be noted that the above-listed modifications can be combined.

[0083] Oligonucleotides of the invention (e.g., SMOs) also can be modified with chemical moieties (e.g., cholesterol) that improve in vivo pharmacological properties of the oligonucleotides.

[0084] Oligonucleotides of the invention can be α-anomeric nucleic acid molecules, which form specific double-stranded hybrids with complementary RNA in which, contrary to the usual α-units, the strands run parallel to each other (Gaultier et al., Nucleic Acids Res. 15:6625-6641, 1987). The oligonucleotides can also include 2′-O-methylribonucleotide (Inoue et al., 1987, Nucleic Acids Res. 15:6131-6148) or a chimeric RNA-DNA analogue (Inoue et al., 1987, FEBS Lett. 215:327-330).

[0085] In various embodiments, the oligonucleotides of the invention can be modified at the base moiety, sugar moiety, or phosphate backbone to improve, e.g., the stability, hybridization, or solubility of the molecule. For example, the deoxyribose phosphate backbone of the nucleic acid molecules can be modified to generate peptide nucleic acid molecules (see Hyrup et al., Bioorg. Med. Chem. 4(1): 5-23, 1996). As used herein, the terms “peptide nucleic acids” or “PNAs” refer to nucleic acid mimics, e.g., DNA mimics, in which the deoxyribose phosphate backbone is replaced by a pseudopeptide backbone and only the four natural nucleobases are retained. The synthesis of PNA oligomers can be performed using standard solid phase peptide synthesis protocols as described in Hyrup et al., 1996, supra; Perry-O'Keefe et al., Proc. Natl. Acad. Sci. U.S.A. 93:14670-14675, 1996. In another embodiment, PNAs can be modified, e.g., to enhance their stability or cellular uptake, by attaching lipophilic or other helper groups to PNA, by the formation of PNA-DNA chimeras, or by the use of liposomes or other techniques of drug delivery known in the art. For example, PNA-DNA chimeras can be generated which can combine the advantageous properties of PNA and DNA. Such chimeras allow DNA recognition enzymes, e.g., RNase H and DNA polymerases, to interact with the DNA portion while the PNA portion would provide high binding affinity and specificity. PNA-DNA chimeras can be linked using linkers of appropriate lengths selected in terms of base stacking, number of bonds between the nucleobases, and orientation (Hyrup, 1996, supra). The synthesis of PNA-DNA chimeras can be performed as described in Hyrup, 1996, supra, and Finn et al., Nucleic Acids Res. 24(17):3357-3363, 1996.

[0086] The oligonucleotides of the invention can also be formulated as morpholino oligonucleotides. In such embodiments, the riboside moiety of each subunit of an oligonucleotide of the oligonucleotide is converted to a morpholine moiety (morpholine=C₄H9NO; Heasman, Dev. Biol. 243, 209-214, 2002).

[0087] A further oligonucleotide modification includes Locked Nucleic Acids (LNAs), in which the 2′-hydroxyl group is linked to the 3′ or 4′ carbon atom of the sugar ring thereby forming a bicyclic sugar moiety. The linkage can be a methylene (˜CH₂˜)ₙ group bridging the 2′ oxygen atom and the 4′ carbon atom wherein n is 1 or 2. LNAs and preparation thereof are described in WO 98/39352 and WO 99/14226. In other embodiments, the oligonucleotide can include other appended groups such as peptides (e.g., for targeting host cell receptors in vivo), or agents facilitating transport across the cell membrane (see, e.g., Letsinger et al., Proc. Natl. Acad. Sci. U.S.A. 86:6553-6556, 1989; Lemaitre et al., Proc. Natl. Acad. Sci. USA 84:648-652, 1987; WO 88/09810) or the blood-brain barrier (see, e.g., WO 89/10134). In addition, oligonucleotides can be modified with hybridization-triggered cleavage agents (see, e.g., Krol et al., Bio/Techniques 6:958-976, 1988) or intercalating agents (see, e.g., Zon, Pharm. Res. 5:539-549, 1988). To this end, the oligonucleotide can be conjugated to another molecule, e.g., a peptide, hybridization triggered cross-linking agent, transport agent, hybridization-triggered cleavage agent, etc.

[0088] Within the oligonucleotides (e.g., oligoribonucleotides) of the invention, as few as one or as many as all of the nucleotides of the oligonucleotide can be modified. For example, a 20-mer oligonucleotide (e.g., oligoribonucleotide) of the invention can contain 1, 2, 3, 4, 5, 6, 7, 8, 9, 10, 11, 12, 13, 14, 15, 16, 17, 18, 19, or 20 modified nucleotides. In various examples, the modified oligonucleotides (e.g., oligoribonucleotides) contain as few modified nucleotides as are necessary to achieve a desired level of in vivo stability and/or bio-accessibility while maintaining cost effectiveness. SMOs of the invention include oligonucleotides synthesized to include any combination of modified bases disclosed herein in order to optimize function. In one example, an SMO of the invention includes at least two different modified bases. In another example, an SMO of the invention includes alternating 2′-O-methyl substitutions and bicyclic sugar moieties (e.g. LNA bases).

[0089] In certain embodiments, the SMO comprises at least one nucleotide that contains a non-naturally occurring modification comprising at least one of a chemical composition of phosphorothioate 2′-O-methyl (2′OMe), phosphorothioate 2′-methoxyethyl (2′-O-MOE), locked nucleic acid (LNA) peptide nucleic acid (PNA), phosphorodiamindate morpholino (PMO), or any combination thereof.

[0090] In certain embodiments, the SMO comprises at least one 2′-O-methyl nucleotide. In certain embodiments, the SMO comprises at least two 2′-O-methyl nucleotides. In certain embodiments, the SMO comprises at least three 2′-O-methyl nucleotides. In certain embodiments, at least about 10, 20, 30, 40, 50, 60, 70, 80, 90 or 100% of the SMO nucleotides are 2′-O-methyl modified.

[0091] In certain embodiments, the SMO comprises at least one nucleotide with a phosphorothioate linkage. In certain embodiments, the SMO comprises at least two nucleotides with phosphorothioate linkages. In certain embodiments, the SMO comprises at least three nucleotides with phosphorothioate linkages. In certain embodiments, at least about 10, 20, 30, 40, 50, 60, 70, 80, 90 or 100% of the SMO nucleotides comprise phosphorothioate linkages.

[0092] In certain embodiments, the SMO comprises at least one phosphorothioate 2′-O-methyl modified nucleotide. In certain embodiments, the SMO comprises at least two phosphorothioate 2′-O-methyl modified nucleotides. In certain embodiments, the SMO comprises at least three phosphorothioate 2′-O-methyl modified nucleotides. In certain embodiments, at least about 10, 20, 30, 40, 50, 60, 70, 80, 90 or 100% of the SMO nucleotides are phosphorothioate 2′-O-methyl modified.

[0093] In certain embodiments, modifications include a bicyclic sugar moiety similar to LNAs (see U.S. Pat. No. 6,043,060) where the bridge is a single methylene group which connect the 3′-hydroxyl group to the 4′ carbon atom of the sugar ring thereby forming a 3′-C,4′-C-oxymethylene linkage. In certain embodiments oligonucleotide modifications include cyclohexene nucleic acids (CeNA), in which the furanose ring of a DNA or RNA molecule is replaced with a cyclohexenyl ring to increase stability of the resulting complexes with RNA and DNA complements (Wang et al., Nucleic Acids 20(4-7):785-788, 2001). In certain embodiments oligonucleotide modifications include constrained 2′O-methoxyethyl (cMOE) in which the ethyl group of 2′O-methoxyethyl is connected to the 4′ position of the furanose ring and constrained ethyl (cEt), in which the ethyl group of the cMOE is replaced with a methyl group that is similarly connected to the 4′ position of the furanose ring (Seth et al., Nucleic Acids Symp. Ser. (Oxf)(52):553-554, 2008). In certain embodiments other bicyclic and tricyclic nucleoside analogs are included in the SMO.

### Methods of Use

[0094] Methods of Modulating RAGE pre-mRNA Splicing

[0095] The invention provides compositions and methods for modulating RAGE pre-mRNA splicing using an SMO of the invention. For example, in various examples, an SMO may modulate pre-mRNA splicing by removing an exon (e.g., exon 10), including an exon (e.g., exon 9), or inducing full or partial inclusion of an intron (e.g., exon 9), in order to alter protein isoform expression (e.g., to enhance expression of sRAGE isoforms with decoy receptor function, or decrease expression of membrane bound RAGE isoforms with receptor signaling function, or a combination thereof). For example, an SMO as described herein may modulate RAGE pre-mRNA by read-through of the 5′ splice site of exon 9 resulting in inclusion of part or all of intron 9, or excluding exon 10, or any combination thereof in the resulting RAGE mRNA. These SMOs may be used to modify RAGE properties, i.e., to produce isoforms with decoy receptor function, or inhibit production of RAGE isoforms with receptor signaling function, or a combination thereof. In other embodiments, an SMO described herein may modulate RAGE pre-mRNA by read-through of the 5′ splice site of exon 9 resulting in inclusion of part or all of intron 9, or excluding exon 10, or any combination thereof in the resulting RAGE mRNA. These SMOs may be used to generate a RAGE protein that has decoy receptor function, or that is not translated. Details of possible splicing patterns obtained using the methods of the invention are set forth in FIG. 3.

[0096] Accordingly, certain embodiments of the invention provide a method of modulating splicing of a RAGE pre-mRNA, either in vitro or in vivo comprising contacting a cell with an effective amount of an SMO or composition described herein. In certain embodiments, the SMO specifically binds to a RAGE pre-mRNA sequence (e.g., at an intron/exon splice site, ESE and/or ISE), thereby causing read-through of the 5′ splice site of exon 9 resulting in inclusion of part or all of intron 9, or exclusion of exon 10, or any combination thereof from a resulting RAGE mRNA.

[0097] Certain embodiments of the invention provide a method of modulating splicing of a RAGE pre-mRNA comprising contacting a cell with an effective amount of an SMO that specifically binds to a complementary sequence on the pre-mRNA at a intron-exon splice site, ESE and/or ISE, wherein when the SMO specifically binds to the complementary sequence, causing read-through of the 5′ splice site of exon 9 resulting in inclusion of part or all of intron 9, or exclusion of exon 10, or any combination thereof in the resulting mRNA, and wherein the resulting mRNA encodes a RAGE protein.

[0098] Certain embodiments of the invention provide a method of modulating splicing of a RAGE pre-mRNA comprising contacting a cell with an effective amount of an SMO that specifically binds to a complementary sequence on the pre-mRNA at a intron-exon splice site, ESE and/or ISE, wherein when the SMO specifically binds to the complementary sequence, causing read-through of the 5′ splice site of exon 9 resulting in inclusion of part or all of intron 9, or exclusion of exon 10, or any combination thereof in the resulting mRNA, and wherein the resulting mRNA encodes a RAGE protein.

[0099] In some embodiments, sRAGE (including RAGEv1) protein production is enhanced in a treated cell, cell extract, organism or patient, with an enhancement of sRAGE (including RAGEv1) RAGE protein levels of at least about 1.1-, 1.2-, 1.5-, 2-, 3-, 4-, 5-, 7-, 10-, 20-, 100-fold and higher values being exemplary. In another embodiment of the invention, membrane bound RAGE (including flRAGE) protein production is reduced in a treated cell, cell extract, organism or patient, with a decrement of membrane bound RAGE (including flRAGE) protein levels of at least about 1.1-, 1.2-, 1.5-, 2-, 3-, 4-, 5-, 7-, 10-, 20-, 100-fold and lower values being exemplary. Enhancement of gene expression refers to the presence (or observable increase) in the level of protein and/or mRNA product from a target RNA. Decrement in gene expression refers to the absence (or observable decrease) in the level of protein and/or mRNA product from a target RNA. Specificity refers to the ability to act on the target RNA without manifest effects on other genes of the cell. The consequences of modulation of the target RNA can be confirmed by examination of the outward properties of the cell or organism or by biochemical techniques such as RNA solution hybridization, nuclease protection, Northern hybridization, reverse transcription, gene expression monitoring with a microarray, antibody binding, enzyme linked immunosorbent assay (ELISA), Western blotting, radioimmunoassay (RIA), other immunoassays, and fluorescence activated cell analysis (FACS).

### Methods of Treating Diseases and Disorders

[0100] A wide range of different diseases and conditions are associated with increased flRAGE expression or activity (over activation), increased expression of RAGE ligands, and/or decreased sRAGE, or otherwise are associated with dysregulation of RAGE activity or function. The invention can thus be used to modulate RAGE pre-mRNA splicing to correct pathological RAGE activity or function caused by excess membrane bound RAGE (including flRAGE) or decreased sRAGE (including RAGEv1). Further RAGE pre-mRNA splicing can be modulated to treat any disease or disorder to which reducing membrane bound RAGE (including flRAGE) or increasing sRAGE (including RAGEv1) is therapeutic. RAGE pre-mRNA splicing is also modulated as a tool for studying RAGE both in vitro and in vivo. More generally, the invention can be used in the treatment or prevention of diseases and disorders in which dysregulation of RAGE ligands and RAGE isoform expression, including dysregulated RAGE alternative splicing, have been shown to contribute significantly to disease pathology.

[0101] For example, the invention can be used in the treatment of neurological diseases and conditions, including neurodegenerative diseases and conditions. Thus, in various examples, the invention can be used in the treatment of Alzheimer's disease, amyotropic lateral sclerosis (ALS), brain injury, and related neurological and neuroinflammatory diseases or conditions.

[0102] The invention can further be used in the treatment and prevention (e.g., prevention of recurrence and/or metastases) of cancer including, e.g., brain cancer (such as glioma or glioblastoma), lung cancer, prostate cancer, gastric cancer, colon cancer, common bile duct cancer, pancreatic cancer, breast cancer, liver cancer, and cancer-treatment-related pain.

[0103] In addition, the invention can be used to treat or prevent diabetes mellitus (type I or type II) and related diseases or conditions. For example, the invention can be used in the treatment or prevention of pre-diabetes, glucose intolerance, diabetic allodynia, neuropathy (e.g., peripheral neuropathy), diabetes-related atherosclerosis (including coronary artery disease and peripheral artery disease), diabetic peripheral vascular disease, diabetic ischemia, diabetic pain, diabetic retinopathy, diabetic nephropathy, and diabetic wound healing.

[0104] The invention can additionally be used in the treatment and prevention of pulmonary diseases and conditions including, e.g., respiratory distress syndrome (RDS), including acute RDS (ARDS), acute lung injury (ALI), chronic obstructive pulmonary disease, emphysema, asthma, cystic fibrosis, idiopathic pulmonary fibrosis, and airway injury.

[0105] Further, the invention can be used in the treatment and prevention of cardiovascular diseases and conditions including, e.g., atherosclerosis (including coronary artery disease and peripheral artery disease), heart failure, ischemia-reperfusion injury, and stroke.

[0106] The invention can also be used in the treatment and prevention of immunological, inflammatory, and autoimmune diseases including, e.g., lupus, multiple sclerosis, osteoarthritis, rheumatoid arthritis, sepsis, transplant rejection (e.g., heart, kidney, or islet cells), graft vs. host disease, and inflammatory bowel syndrome

[0107] The invention can also be used in the treatment and prevention of liver diseases and conditions including, e.g., non-alcoholic fatty liver disease (NAFLD), fibrosis, cirrhosis, hepatocellular carcinoma, hepatitis (e.g., hepatitis B), and liver fibrosis.

[0108] Nucleic acid molecules (e.g., SMOs) can be administered for use in the methods of the invention using methods that are known in the art. SMOs are typically administered to a subject, or generated in situ, such that they hybridize with or bind to RAGE pre-mRNA, as described above. The method of delivery selected will depend on factors including, e.g., the cells, tissues, or organs to be treated and their locations, as understood by those skilled in the art. Delivery can be systemic or targeted, with targeting optionally being achieved by the use of a targeting agent or by local administration.

[0109] In some examples, conjugation of an SMO to agents facilitating their delivery, e.g., anthraquinones, acridines, biotin, carbohydrates, chitosans, cholesterol, phospholipids, dendrimers, other lipid and liposomal moieties, colloidal polymeric particles, coumarins, dyes (such as fluoresceins and rhodamines), folate, peptides, phenanthridine, and phenazines, N-Acetylgalactosamine (GalNAc), other sugar derivatives, as well as other means known in the art, can be used to deliver the SMOs to cells.

[0110] In other examples, SMOs are delivered using one or more of, e.g., methods involving liposome-mediated uptake, lipid conjugates, sugar-derivative conjugates, polylysine-mediated uptake, nanoparticle-mediated uptake, and receptor-mediated endocytosis, as well as additional non-endocytic modes of delivery, such as microinjection, permeabilization (e.g., streptolysin-O permeabilization, anionic peptide permeabilization), electroporation, and various non-invasive non-endocytic methods of delivery that are known in the art (see, e.g., Dokka et al., Adv. Drug De. Rev. 44(1):35-49, 2000; Winkler et al., Ther. Deliv. 4(7):791-809, 2013). Methods of delivery may also include the use of cationic lipids (e.g., N-[-1-(2,3-dioleoyloxy)propyl]N,N,N-triethylammonium chloride (DOTMA) and a 1:1 molar ratio of 1,2-dimyristyloxy-propyl-3-dimethylhydroxyethylammonium bromide (DMRIE) and dioleoyl phosphatidylethanolamine (DOPE); see e.g., Logan et al., Gene Therapy 2:38-49, 1995; San et al., Human Gene Therapy 4:781-788, 1993); receptor-mediated uptake (e.g., by complexing to a cation, such as polylysine, which is coupled to a ligand for a cell-surface receptor; see for example Wu et al., J. Biol. Chem. 263:14621, 1988; Wilson et al., J. Biol. Chem. 267:963-967, 1992; and U.S. Pat. No. 5,166,320); adenovirus capsids (see, for example, Curiel et al., Proc. Natl. Acad. Sci. USA 88:8850, 1991; Cristiano et al., Proc. Natl. Acad. Sci. U.S.A. 90:2122-2126, 1993); and lipid-based compounds that are not liposomes (e.g., lipofectins and cytofectins).

[0111] The SMOs can optionally be delivered by routes including, for example, intravenous, intramuscular, intradermal, intravitreous, subcutaneous, intranasal, and transdermal routes. Oligonucleotides, including SMOs, can be directly introduced into a cell, tissue, or organ, or introduced extracellularly into a cavity, interstitial space, or the circulation of a subject. Vascular or extravascular circulation, including the blood or lymph systems, and the cerebrospinal fluid, are examples of sites where an oligonucleotide, such as an SMO, may be introduced. In one embodiment, an SMO is delivered directly into the cerebral spinal fluid (CSF) of a subject, e.g., by epidural injection, intrathecal or intracerebroventricular injection (e.g., using an infusion pump), or direct brain delivery with a pump or other device.

[0112] SMOs can be modified to promote crossing of the blood-brain-barrier (BBB) to achieve their delivery to the central nervous system (CNS; see, e.g., Forte et al., Curr. Drug Targets 6:21-29, 2005; Jaeger et al., Methods Mol. Med. 106:237-251, 2005; Vinogradov et al., Bioconjug. Chem. 5:50-60, 2004). In some examples, SMOs are conjugated to a peptide to facilitate delivery of the SMO across the following parenteral administration to a subject. The SMO can be either directly conjugated to the peptide or indirectly conjugated to the peptide via a linker molecule, such as a poly amino acid linker, or by electrostatic interaction. Peptides useful in delivering SMOs across the BBB include, e.g., peptides derived from the rabies virus glycoprotein (RVG) that specifically bind to the nicotinic acetylcholine receptor (AchR) present on neurons and the vascular endothelium of the BBB, thereby allowing transvascular delivery, probably by receptor-mediated transcytosis (Kumar et al., Nature 448:39-43, 2007); Kunitz domain-derived peptides called angiopeps (Demeule et al., J. Neurochem. 106: 1534-1544, 2008; Demeule et al., J. Pharmacol. Exp. Ther. 324:1064-1072, 2008).

[0113] Recombinant methods known in the art can also be used to achieve oligonucleotide reagent-induced modulation of splicing in a target nucleic acid. For example, vectors containing oligonucleotides can be employed to express, e.g., an antisense oligonucleotide to modulate splicing of an exon of a targeted pre-mRNA.

[0114] SMOs can be administered in doses and in regimens determined to be appropriate by those of skill in the art. For example, dosing for CNS manifestations can be accomplished by direct bolus intrathecal injection as infrequently as every 1-6 months, weekly in multiple loading doses, or by continuous infusion via pump (i.e., Omaya Reservoir) directly into the hippocampus. Dosing for peripheral indications can be achieved through subcutaneous or intravenous injections as infrequently as every 1-6 months, or a multiple loading dose strategy could also be used.

### Pharmaceutical Compositions and Therapies

[0115] The invention also provides pharmaceutical compositions including one or more SMO of the invention, optionally in combination with a pharmaceutically-acceptable carrier or diluent (e.g., sterile isotonic saline or sterile water). The compositions may be in the form of a liquid or may be in dried form. As used herein the term “pharmaceutically acceptable carrier” is intended to include any and all solvents, dispersion media, coatings, antibacterial and antifungal agents, isotonic, and absorption delaying agents, and the like, compatible with pharmaceutical administration. The use of such media and agents for pharmaceutically active substances is well known in the art. Except insofar as any conventional media or agent is incompatible with the active compound, use thereof in the compositions is contemplated. Supplementary active compounds can also be incorporated into the compositions. Standard formulations that can be used in the invention are described, e.g., in Remington's Pharmaceutical Sciences (1985, Genaro, ed., Mack Publishing Co., Easton, Pa.).

[0116] The oligonucleotide, i.e. the SMO, may be introduced in an amount which allows delivery of at least one copy per cell. Higher doses (e.g., at least 5, 10, 100, 500 or 1000 copies per cell) of material may yield more effective modulation; lower doses may also be useful for specific applications.

[0117] The therapeutic and prophylactic methods of the invention thus encompass the use of pharmaceutical compositions comprising a splice modifying oligonucleotide of the invention to practice the methods of the invention. The precise dosage administered will vary depending upon any number of factors, including but not limited to, the type of animal and type of disease state being treated, the age of the animal and the route of administration.

[0118] The compound may be administered to an animal as frequently as several times daily, or it may be administered less frequently, such as once a day, once a week, once every two weeks, once a month, or even less frequently, such as once every several months or even once a year or less. The frequency of the dose will be readily apparent to the skilled artisan and will depend upon any number of factors, such as, but not limited to, the type and severity of the disease being treated, the type and age of the animal, etc. The formulations of the pharmaceutical compositions described herein may be prepared by any method known or hereafter developed in the art of pharmacology. In general, such preparatory methods include the step of bringing the active ingredient into association with a carrier or one or more other accessory ingredients, and then, if necessary or desirable, shaping or packaging the product into a desired single- or multi-dose unit.

### Kits

[0119] The invention further provides kits for practicing the methods of the invention. By a “kit” is intended any manufacture (e.g., a package or a container) including at least one reagent, e.g., at least one SMO, for targeting RAGE, as described herein, and for the treatment or prevention of a disease, disorder, or condition, e.g., Alzheimer's disease (also see above). In one embodiment, the kit includes at least one SMO for specifically enhancing the expression of sRAGE (including RAGEv1) protein, reducing membrane bound RAGE (including flRAGE), or a combination thereof (e.g., for enhancing the read-through the 5′ splice site of exon 9 resulting in inclusion of part or all of intron 9, or exclusion of exon 10, or a combination thereof). The kits may contain a package insert describing the kit and including instructional material for its use. Further, positive, negative, and/or comparator controls may be included in the kits.

### Animal Models and Screening Methods

[0120] The invention also includes animal models that can be used to identify or characterize SMOs directed against RAGE, such as those of the invention. In various embodiments, the animal models are mice (e.g., C57/B6 mice) that express human RAGE (RAGE Tg mice). The animal models can be transgenic animals, in which a human AGER sequence is introduced into the genome of the animal, such that it is capable of producing alternatively spliced RAGE mRNA variants. The human AGER sequence can optionally be introduced into the genome in place of or in addition to the AGER sequence of the animal using methods that are known in the art. For example, methods including the use of CRISPR/Cas-9 or another gene editing approach can be used. Additionally, approaches utilizing standard homologous recombination or microinjection of modified ES cells can be used.

[0121] In some embodiments, the animal model is a mouse and, optionally, the mouse sequence encoding RAGE is deleted from the genome of the mouse using, e.g., gene editing methods (e.g., CRISPR/Cas9-based methods). In some embodiments, a human sequence encoding RAGE, such as a genomic sequence encoding exons and introns (e.g., NCBI Reference Sequence: NM_001206929.1), is inserted into the genome of the mouse so that it is under the control of the mouse promoter that directs expression of RAGE.

[0122] In one example, the RAGE-Tg mouse is a humanized model, whereby the human AGER gene containing both exons and introns was replaced in C57BL/6 mice under the control of the mouse RAGE promoter using CRISPR/Cas-mediated genome engineering. Mouse Ager (ATG start codon to TAA stop codon) was replaced with the human AGER (ATG start codon to TGA stop codon) cassette. The human AGER gene (NCBI Reference Sequence: NM_001206929.1), located on human chromosome 6 contains eleven exons, with the ATG start codon in exon 1 and TGA stop codon in exon 11. The mouse Ager gene (NCBI Reference Sequence: NM_007425.3), located on mouse chromosome 17, also contains eleven exons have been identified, but with the ATG start codon in exon 1 and TAA stop codon in exon 11. To engineer the donor vector, homology arms were generated by PCR using BAC clone RP24-357H14 and RP24-376H18 from the C57BL/6 library as template. Cas9 and guide (g)RNA were co-injected into fertilized eggs with donor vector for mouse production.

### Guide RNA:

gRNA1 (matching reverse strand of gene):
(SEQ ID: 2903)
AGCTGCTGTCCCCGCTGGCATGG
gRNA2 (matching reverse strand of gene):
(SED ID: 2904)
TGGGTGCTCTTACGGTCCCCCGG

[0124] The resulting F0 pups were genotyped by PCR with gel electrophoresis confirmation of the product size, followed by Sanger sequencing of PCR product. Three F0 mice with targeted insertion of the humanized AGER gene (RAGE-Tg) were then bred to C57BL/6 mice to generate F1 mice, and so forth.

[0125] The animal models of the invention can be used in methods to identify or characterize SMOs directed against human RAGE. For example, an SMO directed against human RAGE (e.g., an SMO comprising, consisting essentially of, or consisting of a sequence of SEQ ID NO: 5-2897) can be introduced into an animal model (e.g., a neonatal RAGE transgenic mouse) and the effects of this treatment monitored. In various embodiments, effects on splicing are monitored. For example, expression of membrane bound RAGE (including flRAGE) and sRAGE (including RAGEv1) is evaluated, e.g., by RT-QPCR. In another example, SMOs are tested in an inducible model disease (e.g., an ICV STZ model of sporadic AD; see below) and effects on disease process, progression, cognition, or histopathology are examined. In yet another example, SMOs are tested in a model where RAGE Tg mice are bred to mice harboring disease-related mutations (e.g., presenilin mutations implicated in AD, SOD1 mutations implicated in ALS, or CFTR mutations implicated in cystic fibrosis) to generate mice harboring both the human RAGE transgene and disease mutation, and where effects on disease process, progression, cognition, or histopathology are examined.

### General Terminology

[0126] Unless defined otherwise, all technical and scientific terms used herein generally have the same meaning as commonly understood by one of ordinary skill in the art to which this invention belongs. Generally, the nomenclature used herein and the laboratory procedures in cell culture, molecular genetics, organic chemistry, and nucleic acid chemistry and hybridization are well known and commonly employed in the art.

[0127] Standard techniques are used for nucleic acid and peptide synthesis. The techniques and procedures are generally performed according to conventional methods in the art and various general references (e.g., Sambrook et al., 2001, Molecular Cloning, A Laboratory Approach, Cold Spring Harbor Press, Cold Spring Harbor, N.Y., and Ausubel et al., 2002, Current Protocols in Molecular Biology, John Wiley & Sons, NY), which are provided throughout this document.

[0128] The nomenclature used herein and the laboratory procedures used in analytical chemistry and organic syntheses described below are well known and commonly employed in the art. Standard techniques or modifications thereof, are used for chemical syntheses and chemical analyses.

[0129] As used herein, each of the following terms has the meaning associated with it in this section.

[0130] The articles “a” and “an” are used herein to refer to one or to more than one (i.e., to at least one) of the grammatical object of the article. By way of example, “an element” means one element or more than one element.

[0131] The term “about” will be understood by persons of ordinary skill in the art and will vary to some extent on the context in which it is used.

[0132] “Antisense activity” means any detectable or measurable activity attributable to the hybridization of an antisense compound to its target nucleic acid. In certain embodiments, antisense activity is a change in the amount or expression of a target nucleic acid or protein encoded by such target nucleic acid.

[0133] “Antisense compound” means an oligomeric compound that is capable of undergoing hybridization to a target nucleic acid through hydrogen bonding. Examples of antisense compounds include single-stranded and double-stranded compounds, such as SMOs, antisense oligonucleotides, siRNAs, shRNAs, ssRNAs, and occupancy-based compounds. Antisense mechanisms include, without limitation, RNase H mediated antisense; RNAi mechanisms, which utilize the RISC pathway and include, without limitation, siRNA, ssRNA and microRNA mechanisms; and occupancy/steric block based mechanisms, including, without limitation uniform modified oligonucleotides. Certain antisense compounds may act through more than one such mechanism and/or through additional mechanisms.

[0134] “Antisense oligonucleotide” means a single-stranded oligonucleotide having a nucleobase sequence that permits hybridization or binding to a corresponding segment of a target nucleic acid.

[0135] A “disease” is a state of health of subject wherein the subject cannot maintain homeostasis, and wherein if the disease is not ameliorated then the subject's health continues to deteriorate. In contrast, a “disorder” in a subject is a state of health in which the subject is able to maintain homeostasis, but in which the subject's state of health is less favorable than it would be in the absence of the disorder. Left untreated, a disorder does not necessarily cause a further decrease in the subject's state of health. In some embodiments, the subject is an animal (e.g., a mammal, such as a human).

[0136] A disease or disorder is “alleviated” if the severity of a symptom of the disease or disorder, or the frequency with which such a symptom is experienced by a subject, or both, is reduced.

[0137] The terms “effective amount” and “pharmaceutically effective amount” refer to a nontoxic but sufficient amount of an agent to provide the desired biological result. That result can be reduction and/or alleviation of the signs, symptoms, or causes of a disease or disorder, or any other desired alteration of a biological system. An appropriate effective amount in any individual case may be determined by one of ordinary skill in the art using routine experimentation. SMOs are administered in effective amounts, according to the methods of the invention.

[0138] As used herein “endogenous” refers to any material from or produced inside an organism, cell, tissue or system. As used herein, the term “exogenous” refers to any material introduced from or produced outside an organism, cell, tissue or system.

[0139] The term “expression” as used herein is defined as the transcription and/or translation of a particular nucleotide sequence. The term “exonic regulatory elements” as used herein refers to sequences present in pre-mRNA that enhance or suppress splicing of an exon. An exonic regulatory element that enhances splicing of an exon is an exonic splicing enhancer (ESE). An exonic regulatory element that suppresses splicing of an exon is an exonic splicing suppressor (ESS). An intronic regulatory element that enhances splicing of an exon is an intronic splicing enhancer (ISE). An intronic regulatory element that suppresses splicing of an exon is called an intronic splicing suppressor (ISS).

[0140] “Instructional material,” as used herein, includes a publication, a recording, a diagram, or any other medium of expression which can be used to communicate the usefulness of the composition and/or compound of the invention in a kit. It may, for example, be affixed to a container that contains a compound and/or composition of the invention or be shipped together with a container which contains the compound and/or composition. Alternatively, the instructional material may be shipped separately from the container with the intention that the recipient uses the instructional material and the compound cooperatively. Delivery of the instructional material may be, for example, by physical delivery of the publication or other medium of expression communicating the usefulness of the kit, or may alternatively be achieved by electronic transmission, for example by means of a computer, such as by electronic mail, or download from a website.

[0141] By “nucleic acid” is meant any nucleic acid, whether composed of deoxyribonucleosides or ribonucleosides, and whether composed of phosphodiester linkages or modified linkages such as phosphotriester, phosphoramidate, siloxane, carbonate, carboxymethylester, acetamidate, carbamate, thioether, bridged phosphoramidate, bridged methylene phosphonate, phosphorothioate, methylphosphonate, phosphorodithioate, bridged phosphorothioate or sulfone linkages, and combinations of such linkages. The term also includes other modified nucleic acids as described herein. The term nucleic acid also specifically includes nucleic acids composed of bases other than the five biologically occurring bases (adenine, guanine, thymine, cytosine and uracil).

[0142] Deoxyribonucleic acid (DNA) in the majority of organisms is the genetic material while ribonucleic acid (RNA) is involved in the transfer of information contained within DNA into proteins. The term “nucleotide sequence” refers to a polymer of DNA or RNA which can be single- or double-stranded, optionally containing synthetic, non-natural, or altered nucleotide bases capable of incorporation into DNA or RNA polymers.

[0143] The terms “nucleic acid,” “nucleic acid molecule,” “nucleic acid fragment,” “nucleic acid sequence or segment,” or “polynucleotide” may also be used interchangeably with gene, cDNA, DNA and RNA encoded by a gene, e.g., genomic DNA, and even synthetic DNA sequences. The term also includes sequences that include any of the known base analogs of DNA and RNA.

[0144] “Messenger RNA” or “mRNA” is any RNA that specifies the order of amino acids in a protein. It is produced by transcription of DNA by RNA polymerase. In eukaryotes, the initial RNA product (primary transcript, including introns and exons) undergoes processing to yield a functional mRNA (i.e., a mature mRNA), which is then transported to the cytoplasm for translation. “Precursor mRNA” or “pre-mRNA” includes the primary transcript and RNA processing intermediates; the spliceosome assembles on a pre-mRNA and carries out RNA splicing.

[0145] By “fragment” or “portion” is meant a full length or less than full length of the nucleotide sequence.

[0146] “Homology” refers to the percent identity between two polynucleotides or two polypeptide sequences. Two DNA or polypeptide sequences are “homologous” to each other when the sequences exhibit at least about 60% to 85% (including 65%, 75%, 76%, 77%, 78%, 79%, 80%, 81%, 82%, 83%, 84%, and 85%), at least about 90%, or at least about 95% to 99% (including 95%, 96%, 97%, 98%, 99%) contiguous sequence identity over a defined length of the sequences.

[0147] A “variant” of a molecule is a sequence that is substantially similar to the sequence of the native molecule. For nucleotide sequences, variants include those sequences that, because of the degeneracy of the genetic code, encode the identical amino acid sequence of the native protein. Naturally occurring allelic variants such as these can be identified with the use of well-known molecular biology techniques, as, for example, with polymerase chain reaction (PCR) and hybridization techniques. Variant nucleotide sequences also include synthetically derived nucleotide sequences, such as those generated, for example, by using site-directed mutagenesis that encode the native protein, as well as those that encode a polypeptide having amino acid substitutions.

[0148] The terms splice variant and splice isoform may be used interchangeably to denote different mRNAs, a product of which may or may not encode the same protein, but are a result of differential splicing from the same initial pre-mRNA sequence. Specifically, RAGE read-through the 5′ splice site of exon 9 resulting in inclusion of part or all of intron 9, or exclusion of exon 10, or a combination thereof generates the sRAGE (including RAGEv1) mRNA transcript variants, while read-through the 5′ splice site of exon 9 resulting in inclusion or part or all of intron 9, or exclusion of exon 10 also prevents generation of the membrane bound RAGE (including flRAGE) mRNA transcript variants. Generally, nucleotide sequence variants of the invention will have in at least one embodiment 60%, to 70%, e.g., 71%, 72%, 73%, 74%, 75%, 76%, 77%, 78%, to 79%, generally at least 80%, e.g., 81%-84%, at least 85%, e.g., 86%, 87%, 88%, 89%, 90%, 91%, 92%, 93%, 94%, 95%, 96%, 97%, to 98%, sequence identity to the native (endogenous) nucleotide sequence.

[0149] The terms “isolated and/or purified” refer to in vitro isolation of a nucleic acid, e.g., a DNA or RNA molecule from its natural cellular environment, and from association with other components of the cell or test solution (e.g., RNA pool), such as nucleic acid or polypeptide, so that it can be sequenced, replicated, and/or expressed. Thus, the RNA or DNA is “isolated” in that it is free from at least one contaminating nucleic acid with which it is normally associated in the natural source of the RNA or DNA and is typically substantially free of any other mammalian RNA or DNA. The phrase “free from at least one contaminating source nucleic acid with which it is normally associated” includes the case where the nucleic acid is reintroduced into the source or natural cell but is in a different chromosomal location or is otherwise flanked by nucleic acid sequences not normally found in the source cell, e.g., in a vector or plasmid.

[0150] Nucleic acid molecules having base substitutions (i.e., variants) are prepared by a variety of methods known in the art. These methods include, but are not limited to, isolation from a natural source (in the case of naturally occurring sequence variants) or preparation by oligonucleotide-mediated (or site-directed) mutagenesis, PCR mutagenesis, and cassette mutagenesis of an earlier prepared variant or a non-variant version of the nucleic acid molecule.

[0151] As used herein, the terms “derived” or “directed to” with respect to a nucleotide molecule means that the molecule has complementary sequence identity to a particular molecule of interest.

[0152] Conventional notation is used herein to describe polynucleotide sequences: the left-hand end of a single-stranded polynucleotide sequence is the 5′-end; the left-hand direction of a double-stranded polynucleotide sequence is referred to as the 5′-direction.

[0153] The direction of 5′ to 3′ addition of nucleotides to nascent RNA transcripts is referred to as the transcription direction. The DNA strand having the same sequence as an mRNA is referred to as the “coding strand;” sequences on the DNA strand which are located 5′ to a reference point on the DNA are referred to as “upstream sequences;” sequences on the DNA strand which are 3′ to a reference point on the DNA are referred to as “downstream sequences.”

[0154] The terms “protein,” “peptide,” and “polypeptide” are used interchangeably herein.

[0155] By “variant” polypeptide is intended a polypeptide derived from the native protein by deletion (so-called truncation) or addition of one or more amino acids to the N-terminal and/or C-terminal end of the native protein; deletion or addition of one or more amino acids at one or more sites in the native protein; or substitution of one or more amino acids at one or more sites in the native protein. Such variants may results form, for example, genetic polymorphism or from human manipulation. Methods for such manipulations are generally known in the art.

[0156] Thus, the polypeptides may be altered in various ways including amino acid substitutions, deletions, truncations, and insertions. Methods for such manipulations are generally known in the art. For example, amino acid sequence variants of the polypeptides can be prepared by mutations in the DNA. Methods for mutagenesis and nucleotide sequence alterations are well known in the art. See, e.g., Kunkel, Proc. Natl. Acad. Sci. U.S.A. 82:488, 1985; Kunkel et al., Meth. Enzymol., 154:367, 1987; U.S. Pat. No. 4,873,192; Walker and Gaastra, Techniques in Mol. Biol. (MacMillan Publishing Co. (1983), and the references cited therein. Guidance as to appropriate amino acid substitutions that do not affect biological activity of the protein of interest may be found in the model of Dayhoff et al., Atlas of Protein Sequence and Structure (Natl. Biomed. Res. Found. 1978). Conservative substitutions, such as exchanging one amino acid with another having similar properties, may be preferred.

[0157] “Polypeptide” also refers to a polymer composed of amino acid residues, related naturally occurring structural variants, and synthetic non-naturally occurring analogs thereof linked via peptide bonds. Synthetic polypeptides can be synthesized, for example, using an automated polypeptide synthesizer. The term “protein” typically refers to large polypeptides.

[0158] The term “peptide” typically refers to short polypeptides. Conventional notation is used herein to portray polypeptide sequences: the left-hand end of a polypeptide sequence is the amino-terminus; the right-hand end of a polypeptide sequence is the carboxyl-terminus.

[0159] A “polynucleotide” means a single strand or parallel and anti-parallel strands of a nucleic acid. Thus, a polynucleotide may be either a single-stranded or a double-stranded nucleic acid. In the context of the present invention, the following abbreviations for the commonly occurring nucleic acid bases are used. “A” refers to adenosine, “C” refers to cytidine, “G” refers to guanosine, “T” refers to thymidine, and “U” refers to uridine. Polynucleotides can optionally include one or more modifications, analogs, and/or modified nucleotides, such as those described herein.

[0160] The term “oligonucleotide” typically refers to short polynucleotides, generally no greater than about 200 (e.g., up to 150, 100, 75, 60, 50, or 40) nucleotides. It will be understood that when a nucleotide sequence is represented by a DNA sequence (i.e., A, T, G, C), this also includes an RNA sequence (i.e., A, U, G, C) in which “U” replaces “T.” The term “recombinant DNA” as used herein is defined as DNA produced by joining pieces of DNA from different sources.

[0161] The term “recombinant polypeptide” as used herein is defined as a polypeptide produced by using recombinant DNA methods.

[0162] By the term “specifically binds,” as used herein, is meant a molecule, such as an SMO, which recognizes and binds to another molecule or feature (i.e., the target pre-mRNA), but does not substantially recognize or bind other molecules or features in a sample (i.e., other non-target pre-mRNAs). Two nucleic acids substantially recognize or bind to each other when at least about 50%, for example at least about 60% or at least about 80% of corresponding positions in each of the molecules are occupied by nucleotides which normally base pair with each other (e.g., A:T, A:U and G:C nucleotide pairs). For example, two nucleic acids substantially recognize or bind to each other when at least about 90%-100% of corresponding positions in each of the molecules are occupied by nucleotides which normally base pair with each other (e.g., A:T, A:U and G:C nucleotide pairs). Chemical modification of the nucleic acid in part determines hybridization energy and thus how many base pairs are required for specific binding of the SMO nucleic acid sequence and a target nucleic acid sequences. Such calculations are well within the ability of those skilled in the art.

[0163] The term “treatment,” as used herein, refers to reversing, alleviating, delaying the onset of, inhibiting the progress of, and/or preventing a disease or disorder, or one or more symptoms thereof, to which the term is applied in a subject. In some embodiments, treatment may be applied after one or more symptoms have developed. In other embodiments, treatment may be administered in the absence of symptoms. For example, treatment may be administered prior to symptoms (e.g., in light of a history of symptoms and/or one or more other susceptibility factors), or after symptoms have resolved, for example, to prevent or delay their reoccurrence.

[0164] Throughout this disclosure, various aspects of this invention can be presented in a range format. It should be understood that the description in range format is merely for convenience and brevity and should not be construed as an inflexible limitation on the scope of the invention. Accordingly, the description of a range should be considered to have specifically disclosed all the possible subranges as well as individual numerical values within that range. For example, description of a range such as from 1 to 6 should be considered to have specifically disclosed subranges such as from 1 to 3, from 1 to 4, from 1 to 5, from 2 to 4, from 2 to 6, from 3 to 6 etc., as well as individual and partial numbers within that range, for example, 1, 2, 3, 4, 5, 5.5 and 6. This applies regardless of the breadth of the range.

[0165] The invention will now be illustrated by the following non-limiting Example(s).

### Example

[0166] As described herein, SMOs were designed to specifically and potently direct selected alternatively spliced introns and exons in RAGE pre-mRNA and the efficacy of these SMOs is subsequently validated in transgenic mice expressing human RAGE and mouse models of Alzheimer's disease.

### SMOs for Targeting RAGE

[0167] RAGE is implicated in the pathogenesis of a number of diseases including, for example, Alzheimer's disease (AD). SMOs are developed to direct RAGE alternative splicing to decrease membrane bound-RAGE (including flRAGE), increase sRAGE (including RAGEv1), or a combination thereof, as described herein. In particular, SMOs are designed to impart a dual mechanism such that expression of membrane-bound (mbRAGE) or full length (flRAGE) RAGE is decreased, while concomitantly sRAGE is increased, both to reduce pathological RAGE signaling directly and clear RAGE-ligands (which also have other non-RAGE mechanisms of inducing damage) from systemic and CNS circulation.

### Design of Splice Modulating Oligonucleotides (SMOs)

[0168] Splice modulating oligonucleotides (SMOs) are designed and validated that specifically and potently modulate RAGE pre-mRNA splicing to decrease expression of the membrane bound (including flRAGE) isoforms and/or increase expression of the sRAGE (including RAGEv1) isoforms as screened in vivo in normal mice. Candidate SMOs are developed that target splicing of human RAGE pre-mRNA to reduce expression of the flRAGE isoform and/or increase expression of the RAGEv1 isoform. A set of molecular engineering tools are used to identify ranked panels of SMOs that can be used to decrease the expression of the flRAGE isoform and/or increase expression of the RAGEv1 isoform. These SMOs are then tested and the process is refined iteratively from those sequences which provide at least 5% alteration of flRAGE isoform and/or increase expression of the RAGEv1 isoform expression to select the most potent SMO candidates for further testing.

[0169] SMOs are developed to facilitate specific alternative inclusion of all or part of intron 9, which includes a stop codon, in the coding sequence, resulting in reduced expression of the membrane bound RAGE (including flRAGE) protein and/or increased expression of sRAGE (including RAGEv1) protein. Critical splicing motifs are predicted in silico using the most advanced RNA and oligo analysis tools. SMOs targeting RAGE alternative splicing is designed to target either the 3′ or 5′ splice sites and/or sequences corresponding to predicted ESE/ISE clusters near the splice junctions of exon 9 and intron 9. The following summarizes the SMO design process.

[0170] First, conservation between human and mouse RAGE sequences is identified. Alignments of the AGER gene sequences across species have been performed to determine conservation between mouse and human. Although similar, the alternative splicing event that produces RAGEv1 differs between mice and humans to the extent that we have developed transgenic mice with the full human AGER gene encoding for the RAGE protein for in vivo efficacy screening. Using these animals, SMOs developed and tested in mice can be translated directly to human use.

[0171] Second, ESE/ESS/ISE/ISS motifs surrounding the 3′ and 5′ splice sites of alternatively spliced exons in RAGE pre-mRNA are identified. RAGE exon 9 and intron 9 pre-mRNA sequences were surveyed for possible human spicing regulatory motifs. Possible ESE motifs were defined using ESE Finder (Cartegni et al., Nucl. Acids Res. 31(13):3568-3571, 2003), RESCUE-ESE (Dravet et al., Epilepsia 52 Suppl 2 (1-2), 2011; Fairbrother et al., Science 297(5583):1007-1013, 2002), and PESX (Zhang et al., Genes Dev. 18(11):1241-1250, 2004). Possible ESS elements were identified by PESX, and the two hexamer data set analysis by FAS-ESS (Wang et al., Cell 119(6):831-845, 2004) tool. Finally, possible ISE motifs were determined using the ACESCAN2 application (Yeo et al., Proc. Natl. Acad. Sci. U.S.A. 102(8):2850-2855, 2005; Yeo et al., PLoS. Genet. 3(5):e85, 2007).

[0172] Third, RNA Structure and Thermodynamics of RAGE target sequences was assessed. The RNA Structure program (Mathews et al., Proc. Natl. Acad. Sci. U.S.A. 101(19):7287-7292, 2004) can be used to predict secondary structure of target sequences and thermodynamic properties of all potential SMOs targeting RAGE. Additionally, sequence motifs and structures known or predicted to cause immune stimulation or other toxicities, can be screened for and avoided.

[0173] Fourth, BLASTN analysis of potential off-target hybridization is carried out to screen all candidate SMOs for potential hybridization to off-target sites in the human/mouse genomes. SMOs with greater than 85-95% off-target hybridization to any other known gene product are not considered.

[0174] Fifth, SMOs are prioritized based on their combined properties. In particular, thermodynamic properties between SMOs and their target, and self-self binding energies of SMOs, splice site strength, and possible splicing motifs are combined to establish top candidate SMOs for empirical screening and evaluation of splicing specificity and efficiency. These parameters used to select top candidate SMOs for initial screening are all contained in the above referenced oligonucleotide and RNA structure predictive software.

### In Vivo Splicing Efficacy

[0175] The U87-MG and SYSY lines (authenticated by STR DNA fingerprinting analysis—ATCC, USA) are human glioblastoma and neuroblastoma cells, respectively, that endogenously express RAGE (Leclerc et al., J. Biol. Chem. 282(43):31317-31331, 2007). Briefly, cell lines are maintained in RPMI medium containing 10% fetal bovine serum, 2 mM glutamine and streptomycin/penicillin (Leclerc et al., supra). Cells are plated and grown for 1 week or until they reach 50% confluence. RAGE SMOs are then complexed with oligofectamine, applied to each cell line (250 μM SMO), and incubated in reduced serum medium for 24 hours. Medium is replaced and cells grown for an additional 24-48 hours and harvested. GluA3-flip is also endogenously expressed in SYSY cells (Christnacher et al., FEBS Lett. 373(1):93-96, 1995), thus vehicle is used as a negative control, and LSP-GR3 (that reduces expression of GluA3-flip mRNA) as a positive control. Cell viability and cytotoxicity assessment is performed using Alamar Blue (Hamid et al., Toxicol. In Vitro 18(5):703-710, 2004). For mbRAGE and sRAGE mRNA expression, cells are lysed, total RNA extracted (Trizol), converted to cDNA (Mulitscribe reverse transcriptase kit; Applied Biosystems), and examined by real-time quantitative PCR (RT-QPCR). The level of mbRAGE transcripts are measured by TaqMan Gene Expression Assay Hs00542592_g1 (ThermoFisher Scientific). For quantification of sRAGE isoforms, a custom primer and probe set is designed using Primer Express (Applied Biosystems) and is validated for efficiency over 5 logs of cDNA concentration. Relative transcript expression is evaluated by the ΔΔCT method (Livak et al., Methods 25:402-408, 2001) relative to the geometric mean of β-Actin and TBP as endogenous control (Kreth et al., Neuro. Oncol. 12(6):570-579, 2010).

[0176] Using an iterative process of SMO evaluation and optimization, we analyze the efficacy of the 5 top-ranked SMOs, and use these data to make our next SMO choices in a strategic manner. For example, if an SMO shows a significant but incomplete reduction in flRAGE expression, bases may be added or subtracted from either end of the SMO sequence, to further improve efficacy. Although complete reduction of flRAGE expression may not be desirable, increased SMO potency will increase the therapeutic index. SMOs that show the greatest decrease in flRAGE and increase in RAGEv1 isoform expression are evaluated for dose-response over concentrations ranging from 0-250 μM.

### Determination of In Vivo Pre-mRNA Splicing and SMO Efficacy

[0177] Investigation of sRAGE alternative splicing variants revealed orthologous isoforms resulting from the partial inclusion of intron 9 and removal of exon 10 across several relevant species, including monkey, cow, rat, and mouse (Lopez-Diez et al., Genome Biol. Evol. 5(12):2420-2435, 2013). However, alignment of the genomic sequence of human and mouse RAGE revealed distinct differences in the human and mouse sRAGE isoforms, including: 1. stop codon for mouse sRAGE occurs earlier in the transcript, yielding a shorter truncated protein (EGLD; SEQ ID NO: 2901) compared to human (EGFDKVREAEDSPQHM; SEQ ID NO: 2902), 2. the alternative donor sites in intron 9 and the alternative acceptor sites in intron 9 (human) and exon 10 (mouse) are not 100% conserved between species (Kalea et al., FASEB J. 23(6):1766-1774, 2009). Thus, insertion of the human RAGE transgene into mouse is the most efficient method of directly testing in vivo efficacy for both target engagement and efficacy in animal models of disease such that, SMOs developed in cell culture can be tested in mice with resulting data directly translatable to clinical use. Although mouse models have been developed to express RAGE transgenes (Arancio et al., EMBO J. 23(20):4096-4105, 2004; Cho et al., FASEB J. 23(8):2639-2649, 2009) none express transgenes capable of alternative splicing in the CNS.

### Transgenic Human RAGE Expression in Mouse

[0178] Transgenic mouse generation was accomplished through constructing a large fragment nuclease expression vector containing the 1.49 kb human RAGE gene which was delivered via CRISPR/Cas-9 to obtain founder mice on a C57/B6 background. A PCR genotyping assay was developed to identify founders and offspring carrying the transgene. RAGE transgene expression in liver, kidney, and brain tissues is verified by RT-QPCR. Additional details regarding the production of these mice are provided above.

### In Vivo SMO Validation of Target Engagement for Lead Selection

[0179] Efficacy of top candidate SMOs is evaluated in neonatal RAGE transgenic (Tg) C57/B16 pups. SMOs undergo further iterative evaluation and optimization in vivo, where splicing efficacy of the top ranked SMO is examined and the results used to strategically select better optimized versions of that SMOs, as necessary. RAGE transgenic mice are given bilateral ICV injections of SMO (4 μg per lateral ventricle) on post-natal (P)3, P5, and P10, with brain tissues harvested at P12 and processed as previously described (Williams et al., J. Neurosci. 29 (24):7633-7638, 2009; Lykens et al., PLoS One. 2017 Feb. 8; 12(2):e0171538). RAGE expression is highest in the brain during development (Leclerc et al., J. Biol. Chem. 282 (43), 31317-31331, 2007), particularly in the hippocampus, cortical neurons, and glia (Malherbe et al., Brain Res. Mol. Brain Res. 71(2):159-170, 1999). Expression of membrane bound RAGE (including flRAGE) and sRAGE (including RAGEv1) is evaluated by RT-QPCR, and total sRAGE assessed in plasma and CSF from RAGE Tg mice by ELISA (BioVendor, Czech Republic).

[0180] Alternatively, mouse-specific SMOs corresponding to those candidates identified in the human cell culture screening are developed for validation of in vivo SMO effect on target. These mouse-specific SMOs are then used for all subsequent in vivo mouse studies. Mice express homologous RAGE isoforms compared to humans (Kalea et al., FASEB J. 23(6):1766-1774, 2009; Lopez-Diez et al., Genome Biol. Evol. 5(12):2420-2435, 2013) such that SMOs that specifically reduce membrane bound RAGE (including flRAGE) and sRAGE (including RAGEv1) isoforms in mouse can be used for proof-of-concept studies in disease models of AD. There is some controversy as to whether mice express detectable levels of sRAGE protein (Kalea et al., FASEB J. 23(6):1766-1774, 2009). However, RAGE SMOs identified in vitro are expected to produce the same effects on membrane bound RAGE (including flRAGE) and sRAGE (including RAGEv1) transcript expression in vivo in the transgenic mice.

### In Vivo Testing of RAGE SMOs in an Acute Model of Sporadic AD

[0181] Administration of ICY streptozotocin (STZ) is a well-characterized acute model of sporadic AD for early drug candidate screening causing acute cognitive deficits and neurodegeneration/inflammation, tau-hyperphosphorylation within 6 weeks after induction (Chen et al., Mol. Neurobiol. 47(2):711-725, 2013; Saxena et al., Pharmacol. Biochem. Behay. 86(4):797-805, 2007; Saxena et al., Eur. J. Pharmacol. 581(3):283-289, 2008; Grieb, Mol. Neurobiol. 53(3):1741-1752, 2016). Since ICV STZ is also associated with fatty liver, pancreatic islet hypertrophy, and related metabolic abnormalities known to contribute to AD (Bloch et al., J. Alzh. Dis., 60(1):121-136, 2017), we are assessing both ICV and subcutanteous (SC) administration of SMOs to alter brain and peripheral RAGE isoform expression. In non-human primate studies and clinical trials, SMOs delivered by lumbar intrathecal (i.t.) injection readily circulate to, and diffuse throughout the brain (Chiriboga et al., Neurology 86(10); 890-897, 2016; Geary et al., Adv. Drug Deliv. Rev. 87:46-51, 2015; Hache et al., J. Child Neurol. 2016; Finkel, Neurology (Meeting Abstracts) (P5.001), 2016; Rigo et al., J. Pharmacol. Exp. Ther. 350(1):46-55, 2014), without a need for invasive ventricular brain delivery. Although lumbar i.t. bolus injection may be the route of delivery for human clinical trials, the small i.t. space in mice makes consistent delivery to the brain technically challenging (Rigo et al., supra). However, direct ICV delivery is readily feasible in mice, thus, ICY dosing is proposed herein. Treated and control animals are litter-matched to reduce variability, and experimenters are blinded to treatment group.

### Determine the Dose-Response of Lead SMO(s) and Establish SC and ICV Dose Paradigms in Adult RAGE Transgenic Mice

[0182] Adult 129 mice at 6-8 weeks of age are implanted with a custom (Plastics One, Roanoke, Va.), bilateral cannula, which is inserted 1 mm lateral and 0.3 mm caudal to Bregma, and 3 mm in depth into each lateral ventricle, anchored to the skull for repeat ICV dosing access. After a minimum 1 week recovery, mice are given bilateral ICV injection of RAGE SMO or saline (5, 10, or 20 μg in 5 μL total volume), or aged matched mice are given SC injection (20, 40, or 80 μs) in the flank. Liver, kidney, and brain tissues are collected for RT-QPCR and Western blot or ELISA at 1 week and 4 weeks after the final dose. If SMO effect is not maintained out to 4 weeks post-dose, additional doses will be added. This experiment requires 6 treated mice (3M, 3F)/dose, at 6 doses, and 2 time-points, plus sets of ICV and SC vehicle controls at each time point for a total of 96 mice.

### SMO Efficacy Screening in an Acute Sporadic AD Model in RAGE Transgenic Mice

[0183] Two weeks prior to the start of studies, RAGE-Tg mice are cannulated in both lateral ventricles. Single SC and ICY doses are selected based on the described dose-response of lead SMO(s) to establish SC and ICV dose paradigms in adult RAGE transgenic 129 mice. This experiment requires 18 treated mice (9 male, 9 female)/treatment group to adequately power the study (Chen et al., Mol. Neurobiol. 47(2):711-725, 2013), with 4 treatments (SMO or vehicle given ICV or SC) and 2 time-points for a total of 144 mice.

[0184] a. Cognitive Testing:

[0185] Beginning at 8-10 weeks of age, mice are assessed cognitively for novel object recognition, Morris water maze, and passive avoidance tests, all prior to STZ induction (0.5 mg/kg in 10 μL total volume with two ICY doses 48 hours apart) and 2-3 weeks post-STZ injection as described previously (Chen et al., Mol. Neurobiol. 47(2):711-725, 2013; Saxena et al., Pharmacol. Biochem. Behay. 86(4):797-805, 2007; Saxena et al., Eur. J. Pharmacol. 581(3):283-289, 2008). Mice are dosed with vehicle control or SMO either 3 days prior to STZ administration or 24 hours post-STZ inductions. Behavior studies are performed using each mouse as its own baseline control as well as comparing to separate vehicle controls.

[0186] b. Histopathology:

[0187] At 6-8 weeks post-STZ induction mice are euthanized and brains sections examined for Tau hyper-phosphorylation at Ser199/202, Thr205, and Ser214 by Western Blot (Chen et al., Mol. Neurobiol. 47(2):711-725, 2013).

[0188] SMO treatment may alternatively be assessed by acute Aβ injection to model sporadic AD, with SMO effect on cognition assessed by modified hole board test (Schmid et al., Behay. Brain Res. 324:15-20, 2017).

### Statistical Analysis

[0189] Statistical calculations are performed using GraphPad or StatistiXL with significance set at p<0.05 and the mean±SEM determined for each treatment group. RT-Q PCR results are evaluated by student's t-test with Bonferoni correction for multiple comparisons when appropriate. For behavior tests, latency time comparisons among groups are performed by ANOVA followed by Tukey's post-hoc test.

### Other Embodiments

[0190] All publications, patents and patent applications are incorporated herein by reference. While in the foregoing specification this invention has been described in relation to certain embodiments thereof, and many details have been set forth for purposes of illustration, it will be apparent to those skilled in the art that the invention is susceptible to additional embodiments and that certain of the details described herein may be varied considerably without departing from the basic principles of the invention.

[0191] The use of the terms “a” and “an” and “the” and similar referents in the context of describing the invention are to be construed to cover both the singular and the plural, unless otherwise indicated herein or clearly contradicted by context. The terms “comprising,” “having,” “including,” and “containing” are to be construed as open-ended terms (i.e., meaning “including, but not limited to”) unless otherwise noted. Recitation of ranges of values herein are merely intended to serve as a shorthand method of referring individually to each separate value falling within the range, unless otherwise indicated herein, and each separate value is incorporated into the specification as if it were individually recited herein. All methods described herein can be performed in any suitable order unless otherwise indicated herein or otherwise clearly contradicted by context. The use of any and all examples, or exemplary language (e.g., “such as”) provided herein, is intended merely to better illuminate the invention and does not pose a limitation on the scope of the invention unless otherwise claimed. No language in the specification should be construed as indicating any non-claimed element as essential to the practice of the invention.

[0192] Embodiments of this invention are described herein, including the best mode known to the inventors for carrying out the invention. Variations of those embodiments may become apparent to those of ordinary skill in the art upon reading the foregoing description. The inventors expect skilled artisans to employ such variations as appropriate, and the inventors intend for the invention to be practiced otherwise than as specifically described herein. Accordingly, this invention includes all modifications and equivalents of the subject matter recited in the claims appended hereto as permitted by applicable law. Moreover, any combination of the above-described elements in all possible variations thereof is encompassed by the invention unless otherwise indicated herein or otherwise clearly contradicted by context.

[0193] References to sequences in sequence databases herein, such as Genbank Accession numbers and the like, are intended to refer to those sequences as present in the respective databases on the date of filing of this application.

[0194] Embodiments of the invention are within the scope of the following numbered paragraphs.
[0195] 1. A method of modulating splicing of a Receptor for Advanced Glycation End products (RAGE) pre-mRNA, the method comprising contacting a plurality of cells with a splice modulating oligonucleotide (SMO) that specifically binds to a complementary sequence of a pre-mRNA that undergoes splicing to form mRNA encoding a RAGE protein, wherein the SMO alters the relative amounts of mRNA encoding soluble and membrane bound isoforms of RAGE protein produced by the pre-mRNA splicing.
[0196] 2. The method of paragraph 1, wherein the SMO increases the amount of mRNA encoding a soluble isoform of RAGE protein produced.
[0197] 3. The method of paragraph 1 or 2, wherein the SMO decreases the amount of mRNA encoding a membrane bound isoform of RAGE protein.
[0198] 4. The method of any one of paragraphs 1 to 3, wherein the SMO directs read-through of the 5′ splice site of exon 9 of the RAGE pre-mRNA, resulting in inclusion of part or all of intron 9, or exclusion of exon 10, or any combination thereof, in the RAGE pre-mRNA.
[0199] 5. The method of any one of paragraphs 1 to 4, wherein the plurality of cells is in vitro.
[0200] 6. The method of any one of paragraphs 1 to 5, wherein the plurality of cells is in vivo.
[0201] 7. The method of any one of paragraphs 1 to 6, wherein the SMO specifically binds to a complementary sequence of RAGE pre-mRNA in at least one of the group consisting of an exon, an intron, a 5′ UTR, a 3′ UTR, a splice junction, an exon:exon splice junction, an exonic splicing silencer (ESS), an exonic splicing enhancer (ESE), an intronic splicing silencer (ISS), and/or an intronic splicing enhancer (ISE) or a combination of any of the aforementioned in the RAGE pre-mRNA.
[0202] 8. The method of any one of paragraphs 1 to 7, wherein the SMO produces at least a 5 percent increase in read-through of the 5′ splice site of exon 9, resulting in inclusion of part or all of intron 9, or exclusion of exon 10, or any combination thereof, in a RAGE mRNA, as compared to baseline untreated cells, and alters expression of RAGE or one or more isoforms thereof.
[0203] 9. The method of paragraph 6, wherein the plurality of cells is in vivo and the SMO is administered to a subject to treat a disease or condition selected from the group consisting of Alzheimer's disease, amyotrophic lateral sclerosis, diabetes, glucose tolerance, diabetic allodynia and neuropathy, diabetic retinopathy, atherosclerosis (e.g., coronary artery disease and peripheral artery disease), diabetic nephropathy, diabetic wound healing, cardiovascular disease, heart failure, ischemia-reperfusion injury, immunological disease, autoimmune disease (e.g., multiple sclerosis, osteoarthritis, and rheumatoid arthritis), sepsis, transplant rejection, cancer (e.g., glioma, breast cancer, liver cancer), pain, liver disease (e.g., hepatitis and liver fibrosis), and lung disease (e.g., acute airway injury and respiratory distress syndrome, chronic obstructive pulmonary disease, emphysema, asthma, cystic fibrosis, and idiopathic pulmonary fibrosis).
[0204] 10. A splice modulating oligonucleotide (SMO) comprising 10 to 200 (e.g., 15 to 100, or 20 to 50) nucleotides that are complementary to an exonic or intronic sequence within exon 9, intron 9, or exon 10 of a RAGE pre-mRNA and an optional one or two additional nucleotides.
[0205] 11. The SMO of paragraph 10, wherein the SMO sequence comprises one of SEQ ID NOs: 5-2897 or a variant thereof having at least 90% sequence identity to the reference sequence.
[0206] 12. The SMO of paragraph 10 or 11, wherein the SMO sequence comprises one of SEQ ID NOs. 5-2897.
[0207] 13. The SMO of any one of paragraphs 10 to 12, wherein at least one nucleotide in the SMO comprises a non-naturally occurring modification comprising at least one of a chemical composition of phosphorothioate 2′-O-methyl, phosphorothioate 2′-MOE, locked nucleic acid (LNA) including thiol-LNA, a constrained moiety, including a constrained ethyl nucleic acid (cEt) or constrained methoxyethyl (cMOE), peptide nucleic acid (PNA), phosphorodiamidate morpholino (PMO), cholesterol, GalNAc or any combination thereof.
[0208] 14. The SMO of any one of paragraphs 10 to 13, wherein at least one of the nucleotides of the SMO is a phosphorothioate 2′-O-methyl modified nucleotide.
[0209] 15. A pharmaceutical composition comprising an SMO of any one of paragraphs 10 to 14 and a pharmaceutically acceptable carrier or diluent.
[0210] 16. A method of treating or preventing a disease or condition in a subject that would benefit from altered splicing of RAGE pre-mRNA, the method comprising administering to the subject an SMO of any one of paragraphs 10 to 14 or a composition of paragraph 15.
[0211] 17. The method of paragraph 16, wherein the disease or condition is selected from the group consisting of Alzheimer's disease, amyotrophic lateral sclerosis, diabetes, glucose tolerance, diabetic allodynia and neuropathy, diabetic retinopathy, atherosclerosis (e.g., coronary artery disease and peripheral artery disease), diabetic nephropathy, diabetic wound healing, cardiovascular disease, heart failure, ischemia-reperfusion injury, immunological disease, autoimmune disease (e.g., multiple sclerosis, osteoarthritis, and rheumatoid arthritis), sepsis, transplant rejection, cancer (e.g., glioma, breast cancer, liver cancer), pain, liver disease (e.g., hepatitis and liver fibrosis), and lung disease (e.g., acute airway injury and respiratory distress syndrome, chronic obstructive pulmonary disease, emphysema, asthma, cystic fibrosis, and idiopathic pulmonary fibrosis).
[0212] 18. The method of any one of paragraphs 1 to 9, wherein the SMO is an SMO of any one of paragraphs 10 to 14.
[0213] 19. A non-human animal comprising a gene encoding human RAGE.
[0214] 20. The non-human animal of paragraph 19, wherein the non-human animal is a mouse.
[0215] 21. The non-human animal of paragraph 19 or 20, wherein the gene encoding human RAGE has been introduced into the genome of the non-human animal.
[0216] 22. The non-human animal of any one of paragraphs 19 to 21, wherein the gene encoding RAGE of the non-human animal has been edited out, knocked out, and/or replaced with the gene encoding human RAGE.
[0217] 23. The non-human animal of any one of paragraphs 19 to 22, wherein the gene encoding human RAGE is a genomic sequence, encoding exons and introns.
[0218] 24. The non-human animal of any one of paragraphs 19 to 23, wherein the gene encoding human RAGE is under control of the endogenous RAGE promoter of the non-human animal.
[0219] 25. The non-human animal of any one of paragraphs 19 to 24, wherein the non-human animal comprises a disease-related mutation.
[0220] 26. The non-human animal of paragraph 25, wherein the disease-related mutation is in a gene encoding presenilin, SOD1, or the cystic fibrosis membrane transporter (CFTR).
[0221] 27. The non-human animal of any one of paragraphs 19 to 26, which is an inducible disease model.
[0222] 28. The non-human animal of paragraph 27, wherein the non-human animal is an inducible disease model of a disease selected from the group consisting of Alzheimer's disease, amyotrophic lateral sclerosis, diabetes, glucose tolerance, diabetic allodynia and neuropathy, diabetic retinopathy, atherosclerosis, diabetic nephropathy, diabetic wound healing, cardiovascular disease, heart failure, ischemia-reperfusion injury, immunological disease, autoimmune disease, sepsis, transplant rejection, cancer, pain, liver disease, and lung disease, and optionally effects on physiology or disease are assessed.
[0223] 29. A method for identifying or characterizing an SMO directed against human RAGE pre-mRNA, the method comprising introducing an SMO into a non-human animal of any one of paragraphs 19 to 28 and assessing the effects of the SMO on the non-human animal.
[0224] 30. The method of paragraph 29, wherein effects on splicing of RAGE pre-mRNA are assessed.
[0225] 31. The method of paragraph 29 or 30, wherein the non-human animal is a disease model and a feature of the disease is assessed.
[0226] 32. The method of any one of paragraphs 29 to 31, wherein the SMO comprises a sequence selected from SEQ ID NOs: 5-2897.

[0227] Other embodiments are within the scope of the following claims.

The application's sequence listing, which the Patent Office published only in electronic form, follows.

SEQUENCE LISTING (2904 sequences)

SEQ ID NO: 1 - DNA, 282 bp, Artificial Sequence
  Synthetic Construct
gagaggagaggagccgcaacggcggaaacggtgttctactggggttactcgtcccgccgacaggggtccggagggtcctaggggtcccggtcccgatctcaagggtcgggactaggagggtgtctcggacatgcctctgtcccttttaactctcgtgtcggtggtggtgagtggtaaggaaagaacaactggtaggggggtcagtgtacacaacccccgatagaagacgaagggactgaaatagtttggggagtggacgtcaaccggggaggagcggaccaa

SEQ ID NO: 2 - DNA, 282 bp, Artificial Sequence
  Synthetic Construct
aaccaggcgaggaggggccaactgcaggtgaggggtttgataaagtcagggaagcagaagatagcccccaacacatgtgactggggggatggtcaacaagaaaggaatggtgagtggtggtggctgtgctctcaattttccctgtctccgtacaggctctgtgggaggatcagggctgggaactctagccctggccctggggatcctgggaggcctggggacagccgccctgctcattggggtcatcttgtggcaaaggcggcaacgccgaggagaggagag

SEQ ID NO: 3 - RNA, 282 nt, Artificial Sequence
  Synthetic Construct
uugguccgcuccuccccgguugacguccacuccccaaacuauuucagucccuucgucuucuaucggggguuguguacacugaccccccuaccaguuguucuuuccuuaccacucaccaccaccgacacgagaguuaaaagggacagaggcauguccgagacacccuccuagucccgacccuugagaucgggaccgggaccccuaggacccuccggaccccugucggcgggacgaguaaccccaguagaacaccguuuccgccguugcggcuccucuccucuc

SEQ ID NO: 4 - RNA, 282 nt, Artificial Sequence
  Synthetic Construct
cucuccucuccucggcguugccgccuuugccacaagaugaccccaaugagcagggcggcuguccccaggccucccaggauccccagggccagggcuagaguucccagcccugauccucccacagagccuguacggagacagggaaaauugagagcacagccaccaccacucaccauuccuuucuuguugaccauccccccagucacauguguugggggcuaucuucugcuucccugacuuuaucaaaccccucaccugcaguuggccccuccucgccugguu

SEQ ID NO: 5 - RNA, 25 nt, Artificial Sequence
  Synthetic Construct
gcaguuggccccuccucgccugguu

SEQ ID NO: 6 - RNA, 25 nt, Artificial Sequence
  Synthetic Construct
ugcaguuggccccuccucgccuggu

SEQ ID NO: 7 - RNA, 25 nt, Artificial Sequence
  Synthetic Construct
cugcaguuggccccuccucgccugg

SEQ ID NO: 8 - RNA, 25 nt, Artificial Sequence
  Synthetic Construct
ccugcaguuggccccuccucgccug

SEQ ID NO: 9 - RNA, 25 nt, Artificial Sequence
  Synthetic Construct
accugcaguuggccccuccucgccu

SEQ ID NO: 10 - RNA, 25 nt, Artificial Sequence
  Synthetic Construct
caccugcaguuggccccuccucgcc

SEQ ID NO: 11 - RNA, 25 nt, Artificial Sequence
  Synthetic Construct
ucaccugcaguuggccccuccucgc

SEQ ID NO: 12 - RNA, 25 nt, Artificial Sequence
  Synthetic Construct
cucaccugcaguuggccccuccucg

SEQ ID NO: 13 - RNA, 25 nt, Artificial Sequence
  Synthetic Construct
ccucaccugcaguuggccccuccuc

SEQ ID NO: 14 - RNA, 25 nt, Artificial Sequence
  Synthetic Construct
cccucaccugcaguuggccccuccu

SEQ ID NO: 15 - RNA, 25 nt, Artificial Sequence
  Synthetic Construct
ccccucaccugcaguuggccccucc

SEQ ID NO: 16 - RNA, 25 nt, Artificial Sequence
  Synthetic Construct
accccucaccugcaguuggccccuc

SEQ ID NO: 17 - RNA, 25 nt, Artificial Sequence
  Synthetic Construct
aaccccucaccugcaguuggccccu

SEQ ID NO: 18 - RNA, 25 nt, Artificial Sequence
  Synthetic Construct
aaaccccucaccugcaguuggcccc

SEQ ID NO: 19 - RNA, 25 nt, Artificial Sequence
  Synthetic Construct
caaaccccucaccugcaguuggccc

SEQ ID NO: 20 - RNA, 25 nt, Artificial Sequence
  Synthetic Construct
ucaaaccccucaccugcaguuggcc

SEQ ID NO: 21 - RNA, 25 nt, Artificial Sequence
  Synthetic Construct
aucaaaccccucaccugcaguuggc

SEQ ID NO: 22 - RNA, 25 nt, Artificial Sequence
  Synthetic Construct
uaucaaaccccucaccugcaguugg

SEQ ID NO: 23 - RNA, 25 nt, Artificial Sequence
  Synthetic Construct
uuaucaaaccccucaccugcaguug

SEQ ID NO: 24 - RNA, 25 nt, Artificial Sequence
  Synthetic Construct
uuuaucaaaccccucaccugcaguu

SEQ ID NO: 25 - RNA, 25 nt, Artificial Sequence
  Synthetic Construct
cuuuaucaaaccccucaccugcagu

SEQ ID NO: 26 - RNA, 25 nt, Artificial Sequence
  Synthetic Construct
acuuuaucaaaccccucaccugcag

SEQ ID NO: 27 - RNA, 25 nt, Artificial Sequence
  Synthetic Construct
gacuuuaucaaaccccucaccugca

SEQ ID NO: 28 - RNA, 25 nt, Artificial Sequence
  Synthetic Construct
ugacuuuaucaaaccccucaccugc

SEQ ID NO: 29 - RNA, 25 nt, Artificial Sequence
  Synthetic Construct
cugacuuuaucaaaccccucaccug

SEQ ID NO: 30 - RNA, 25 nt, Artificial Sequence
  Synthetic Construct
ccugacuuuaucaaaccccucaccu

SEQ ID NO: 31 - RNA, 25 nt, Artificial Sequence
  Synthetic Construct
cccugacuuuaucaaaccccucacc

SEQ ID NO: 32 - RNA, 25 nt, Artificial Sequence
  Synthetic Construct
ucccugacuuuaucaaaccccucac

SEQ ID NO: 33 - RNA, 25 nt, Artificial Sequence
  Synthetic Construct
uucccugacuuuaucaaaccccuca

SEQ ID NO: 34 - RNA, 25 nt, Artificial Sequence
  Synthetic Construct
cuucccugacuuuaucaaaccccuc

SEQ ID NO: 35 - RNA, 25 nt, Artificial Sequence
  Synthetic Construct
gcuucccugacuuuaucaaaccccu

SEQ ID NO: 36 - RNA, 25 nt, Artificial Sequence
  Synthetic Construct
ugcuucccugacuuuaucaaacccc

SEQ ID NO: 37 - RNA, 25 nt, Artificial Sequence
  Synthetic Construct
cugcuucccugacuuuaucaaaccc

SEQ ID NO: 38 - RNA, 25 nt, Artificial Sequence
  Synthetic Construct
ucugcuucccugacuuuaucaaacc

SEQ ID NO: 39 - RNA, 25 nt, Artificial Sequence
  Synthetic Construct
uucugcuucccugacuuuaucaaac

SEQ ID NO: 40 - RNA, 25 nt, Artificial Sequence
  Synthetic Construct
cuucugcuucccugacuuuaucaaa

SEQ ID NO: 41 - RNA, 25 nt, Artificial Sequence
  Synthetic Construct
ucuucugcuucccugacuuuaucaa

SEQ ID NO: 42 - RNA, 25 nt, Artificial Sequence
  Synthetic Construct
aucuucugcuucccugacuuuauca

SEQ ID NO: 43 - RNA, 25 nt, Artificial Sequence
  Synthetic Construct
uaucuucugcuucccugacuuuauc

SEQ ID NO: 44 - RNA, 25 nt, Artificial Sequence
  Synthetic Construct
cuaucuucugcuucccugacuuuau

SEQ ID NO: 45 - RNA, 25 nt, Artificial Sequence
  Synthetic Construct
gcuaucuucugcuucccugacuuua

SEQ ID NO: 46 - RNA, 25 nt, Artificial Sequence
  Synthetic Construct
ggcuaucuucugcuucccugacuuu

SEQ ID NO: 47 - RNA, 25 nt, Artificial Sequence
  Synthetic Construct
gggcuaucuucugcuucccugacuu

SEQ ID NO: 48 - RNA, 25 nt, Artificial Sequence
  Synthetic Construct
ggggcuaucuucugcuucccugacu

SEQ ID NO: 49 - RNA, 25 nt, Artificial Sequence
  Synthetic Construct
gggggcuaucuucugcuucccugac

SEQ ID NO: 50 - RNA, 25 nt, Artificial Sequence
  Synthetic Construct
ugggggcuaucuucugcuucccuga

SEQ ID NO: 51 - RNA, 25 nt, Artificial Sequence
  Synthetic Construct
uugggggcuaucuucugcuucccug

SEQ ID NO: 52 - RNA, 25 nt, Artificial Sequence
  Synthetic Construct
guugggggcuaucuucugcuucccu

SEQ ID NO: 53 - RNA, 25 nt, Artificial Sequence
  Synthetic Construct
uguugggggcuaucuucugcuuccc

SEQ ID NO: 54 - RNA, 25 nt, Artificial Sequence
  Synthetic Construct
guguugggggcuaucuucugcuucc

SEQ ID NO: 55 - RNA, 25 nt, Artificial Sequence
  Synthetic Construct
uguguugggggcuaucuucugcuuc

SEQ ID NO: 56 - RNA, 25 nt, Artificial Sequence
  Synthetic Construct
auguguugggggcuaucuucugcuu

SEQ ID NO: 57 - RNA, 25 nt, Artificial Sequence
  Synthetic Construct
cauguguugggggcuaucuucugcu

SEQ ID NO: 58 - RNA, 25 nt, Artificial Sequence
  Synthetic Construct
acauguguugggggcuaucuucugc

SEQ ID NO: 59 - RNA, 25 nt, Artificial Sequence
  Synthetic Construct
cacauguguugggggcuaucuucug

SEQ ID NO: 60 - RNA, 25 nt, Artificial Sequence
  Synthetic Construct
ucacauguguugggggcuaucuucu

SEQ ID NO: 61 - RNA, 25 nt, Artificial Sequence
  Synthetic Construct
gucacauguguugggggcuaucuuc

SEQ ID NO: 62 - RNA, 25 nt, Artificial Sequence
  Synthetic Construct
agucacauguguugggggcuaucuu

SEQ ID NO: 63 - RNA, 25 nt, Artificial Sequence
  Synthetic Construct
cagucacauguguugggggcuaucu

SEQ ID NO: 64 - RNA, 25 nt, Artificial Sequence
  Synthetic Construct
ccagucacauguguugggggcuauc

SEQ ID NO: 65 - RNA, 25 nt, Artificial Sequence
  Synthetic Construct
cccagucacauguguugggggcuau

SEQ ID NO: 66 - RNA, 25 nt, Artificial Sequence
  Synthetic Construct
ccccagucacauguguugggggcua

SEQ ID NO: 67 - RNA, 25 nt, Artificial Sequence
  Synthetic Construct
cccccagucacauguguugggggcu

SEQ ID NO: 68 - RNA, 25 nt, Artificial Sequence
  Synthetic Construct
ccccccagucacauguguugggggc

SEQ ID NO: 69 - RNA, 25 nt, Artificial Sequence
  Synthetic Construct
uccccccagucacauguguuggggg

SEQ ID NO: 70 - RNA, 25 nt, Artificial Sequence
  Synthetic Construct
auccccccagucacauguguugggg

SEQ ID NO: 71 - RNA, 25 nt, Artificial Sequence
  Synthetic Construct
cauccccccagucacauguguuggg

SEQ ID NO: 72 - RNA, 25 nt, Artificial Sequence
  Synthetic Construct
ccauccccccagucacauguguugg

SEQ ID NO: 73 - RNA, 25 nt, Artificial Sequence
  Synthetic Construct
accauccccccagucacauguguug

SEQ ID NO: 74 - RNA, 25 nt, Artificial Sequence
  Synthetic Construct
gaccauccccccagucacauguguu

SEQ ID NO: 75 - RNA, 25 nt, Artificial Sequence
  Synthetic Construct
ugaccauccccccagucacaugugu

SEQ ID NO: 76 - RNA, 25 nt, Artificial Sequence
  Synthetic Construct
uugaccauccccccagucacaugug

SEQ ID NO: 77 - RNA, 25 nt, Artificial Sequence
  Synthetic Construct
guugaccauccccccagucacaugu

SEQ ID NO: 78 - RNA, 25 nt, Artificial Sequence
  Synthetic Construct
uguugaccauccccccagucacaug

SEQ ID NO: 79 - RNA, 25 nt, Artificial Sequence
  Synthetic Construct
uuguugaccauccccccagucacau

SEQ ID NO: 80 - RNA, 25 nt, Artificial Sequence
  Synthetic Construct
cuuguugaccauccccccagucaca

SEQ ID NO: 81 - RNA, 25 nt, Artificial Sequence
  Synthetic Construct
ucuuguugaccauccccccagucac

SEQ ID NO: 82 - RNA, 25 nt, Artificial Sequence
  Synthetic Construct
uucuuguugaccauccccccaguca

SEQ ID NO: 83 - RNA, 25 nt, Artificial Sequence
  Synthetic Construct
uuucuuguugaccauccccccaguc

SEQ ID NO: 84 - RNA, 25 nt, Artificial Sequence
  Synthetic Construct
cuuucuuguugaccauccccccagu

SEQ ID NO: 85 - RNA, 25 nt, Artificial Sequence
  Synthetic Construct
ccuuucuuguugaccauccccccag

SEQ ID NO: 86 - RNA, 25 nt, Artificial Sequence
  Synthetic Construct
uccuuucuuguugaccaucccccca

SEQ ID NO: 87 - RNA, 25 nt, Artificial Sequence
  Synthetic Construct
uuccuuucuuguugaccaucccccc

SEQ ID NO: 88 - RNA, 25 nt, Artificial Sequence
  Synthetic Construct
auuccuuucuuguugaccauccccc

SEQ ID NO: 89 - RNA, 25 nt, Artificial Sequence
  Synthetic Construct
cauuccuuucuuguugaccaucccc

SEQ ID NO: 90 - RNA, 25 nt, Artificial Sequence
  Synthetic Construct
ccauuccuuucuuguugaccauccc

SEQ ID NO: 91 - RNA, 25 nt, Artificial Sequence
  Synthetic Construct
accauuccuuucuuguugaccaucc

SEQ ID NO: 92 - RNA, 25 nt, Artificial Sequence
  Synthetic Construct
caccauuccuuucuuguugaccauc

SEQ ID NO: 93 - RNA, 25 nt, Artificial Sequence
  Synthetic Construct
ucaccauuccuuucuuguugaccau

SEQ ID NO: 94 - RNA, 25 nt, Artificial Sequence
  Synthetic Construct
cucaccauuccuuucuuguugacca

SEQ ID NO: 95 - RNA, 25 nt, Artificial Sequence
  Synthetic Construct
acucaccauuccuuucuuguugacc

SEQ ID NO: 96 - RNA, 25 nt, Artificial Sequence
  Synthetic Construct
cacucaccauuccuuucuuguugac

SEQ ID NO: 97 - RNA, 25 nt, Artificial Sequence
  Synthetic Construct
ccacucaccauuccuuucuuguuga

SEQ ID NO: 98 - RNA, 25 nt, Artificial Sequence
  Synthetic Construct
accacucaccauuccuuucuuguug

SEQ ID NO: 99 - RNA, 25 nt, Artificial Sequence
  Synthetic Construct
caccacucaccauuccuuucuuguu

SEQ ID NO: 100 - RNA, 25 nt, Artificial Sequence
  Synthetic Construct
ccaccacucaccauuccuuucuugu

SEQ ID NO: 101 - RNA, 25 nt, Artificial Sequence
  Synthetic Construct
accaccacucaccauuccuuucuug

SEQ ID NO: 102 - RNA, 25 nt, Artificial Sequence
  Synthetic Construct
caccaccacucaccauuccuuucuu

SEQ ID NO: 103 - RNA, 25 nt, Artificial Sequence
  Synthetic Construct
ccaccaccacucaccauuccuuucu

SEQ ID NO: 104 - RNA, 25 nt, Artificial Sequence
  Synthetic Construct
gccaccaccacucaccauuccuuuc

SEQ ID NO: 105 - RNA, 25 nt, Artificial Sequence
  Synthetic Construct
agccaccaccacucaccauuccuuu

SEQ ID NO: 106 - RNA, 25 nt, Artificial Sequence
  Synthetic Construct
cagccaccaccacucaccauuccuu

SEQ ID NO: 107 - RNA, 25 nt, Artificial Sequence
  Synthetic Construct
acagccaccaccacucaccauuccu

SEQ ID NO: 108 - RNA, 25 nt, Artificial Sequence
  Synthetic Construct
cacagccaccaccacucaccauucc

SEQ ID NO: 109 - RNA, 25 nt, Artificial Sequence
  Synthetic Construct
gcacagccaccaccacucaccauuc

SEQ ID NO: 110 - RNA, 25 nt, Artificial Sequence
  Synthetic Construct
agcacagccaccaccacucaccauu

SEQ ID NO: 111 - RNA, 25 nt, Artificial Sequence
  Synthetic Construct
gagcacagccaccaccacucaccau

SEQ ID NO: 112 - RNA, 25 nt, Artificial Sequence
  Synthetic Construct
agagcacagccaccaccacucacca

SEQ ID NO: 113 - RNA, 25 nt, Artificial Sequence
  Synthetic Construct
gagagcacagccaccaccacucacc

SEQ ID NO: 114 - RNA, 25 nt, Artificial Sequence
  Synthetic Construct
ugagagcacagccaccaccacucac

SEQ ID NO: 115 - RNA, 25 nt, Artificial Sequence
  Synthetic Construct
uugagagcacagccaccaccacuca

SEQ ID NO: 116 - RNA, 25 nt, Artificial Sequence
  Synthetic Construct
auugagagcacagccaccaccacuc

SEQ ID NO: 117 - RNA, 25 nt, Artificial Sequence
  Synthetic Construct
aauugagagcacagccaccaccacu

SEQ ID NO: 118 - RNA, 25 nt, Artificial Sequence
  Synthetic Construct
aaauugagagcacagccaccaccac

SEQ ID NO: 119 - RNA, 25 nt, Artificial Sequence
  Synthetic Construct
aaaauugagagcacagccaccacca

SEQ ID NO: 120 - RNA, 25 nt, Artificial Sequence
  Synthetic Construct
gaaaauugagagcacagccaccacc

SEQ ID NO: 121 - RNA, 25 nt, Artificial Sequence
  Synthetic Construct
ggaaaauugagagcacagccaccac

SEQ ID NO: 122 - RNA, 25 nt, Artificial Sequence
  Synthetic Construct
gggaaaauugagagcacagccacca

SEQ ID NO: 123 - RNA, 25 nt, Artificial Sequence
  Synthetic Construct
agggaaaauugagagcacagccacc

SEQ ID NO: 124 - RNA, 25 nt, Artificial Sequence
  Synthetic Construct
cagggaaaauugagagcacagccac

SEQ ID NO: 125 - RNA, 25 nt, Artificial Sequence
  Synthetic Construct
acagggaaaauugagagcacagcca

SEQ ID NO: 126 - RNA, 25 nt, Artificial Sequence
  Synthetic Construct
gacagggaaaauugagagcacagcc

SEQ ID NO: 127 - RNA, 25 nt, Artificial Sequence
  Synthetic Construct
agacagggaaaauugagagcacagc

SEQ ID NO: 128 - RNA, 25 nt, Artificial Sequence
  Synthetic Construct
gagacagggaaaauugagagcacag

SEQ ID NO: 129 - RNA, 25 nt, Artificial Sequence
  Synthetic Construct
ggagacagggaaaauugagagcaca

SEQ ID NO: 130 - RNA, 25 nt, Artificial Sequence
  Synthetic Construct
cggagacagggaaaauugagagcac

SEQ ID NO: 131 - RNA, 25 nt, Artificial Sequence
  Synthetic Construct
acggagacagggaaaauugagagca

SEQ ID NO: 132 - RNA, 25 nt, Artificial Sequence
  Synthetic Construct
uacggagacagggaaaauugagagc

SEQ ID NO: 133 - RNA, 25 nt, Artificial Sequence
  Synthetic Construct
guacggagacagggaaaauugagag

SEQ ID NO: 134 - RNA, 25 nt, Artificial Sequence
  Synthetic Construct
uguacggagacagggaaaauugaga

SEQ ID NO: 135 - RNA, 25 nt, Artificial Sequence
  Synthetic Construct
cuguacggagacagggaaaauugag

SEQ ID NO: 136 - RNA, 25 nt, Artificial Sequence
  Synthetic Construct
ccuguacggagacagggaaaauuga

SEQ ID NO: 137 - RNA, 25 nt, Artificial Sequence
  Synthetic Construct
gccuguacggagacagggaaaauug

SEQ ID NO: 138 - RNA, 25 nt, Artificial Sequence
  Synthetic Construct
agccuguacggagacagggaaaauu

SEQ ID NO: 139 - RNA, 25 nt, Artificial Sequence
  Synthetic Construct
gagccuguacggagacagggaaaau

SEQ ID NO: 140 - RNA, 25 nt, Artificial Sequence
  Synthetic Construct
agagccuguacggagacagggaaaa

SEQ ID NO: 141 - RNA, 25 nt, Artificial Sequence
  Synthetic Construct
cagagccuguacggagacagggaaa

SEQ ID NO: 142 - RNA, 25 nt, Artificial Sequence
  Synthetic Construct
acagagccuguacggagacagggaa

SEQ ID NO: 143 - RNA, 25 nt, Artificial Sequence
  Synthetic Construct
cacagagccuguacggagacaggga

SEQ ID NO: 144 - RNA, 25 nt, Artificial Sequence
  Synthetic Construct
ccacagagccuguacggagacaggg

SEQ ID NO: 145 - RNA, 25 nt, Artificial Sequence
  Synthetic Construct
cccacagagccuguacggagacagg

SEQ ID NO: 146 - RNA, 25 nt, Artificial Sequence
  Synthetic Construct
ucccacagagccuguacggagacag

SEQ ID NO: 147 - RNA, 25 nt, Artificial Sequence
  Synthetic Construct
cucccacagagccuguacggagaca

SEQ ID NO: 148 - RNA, 25 nt, Artificial Sequence
  Synthetic Construct
ccucccacagagccuguacggagac

SEQ ID NO: 149 - RNA, 25 nt, Artificial Sequence
  Synthetic Construct
uccucccacagagccuguacggaga

SEQ ID NO: 150 - RNA, 25 nt, Artificial Sequence
  Synthetic Construct
auccucccacagagccuguacggag

SEQ ID NO: 151 - RNA, 25 nt, Artificial Sequence
  Synthetic Construct
gauccucccacagagccuguacgga

SEQ ID NO: 152 - RNA, 25 nt, Artificial Sequence
  Synthetic Construct
ugauccucccacagagccuguacgg

SEQ ID NO: 153 - RNA, 25 nt, Artificial Sequence
  Synthetic Construct
cugauccucccacagagccuguacg

SEQ ID NO: 154 - RNA, 25 nt, Artificial Sequence
  Synthetic Construct
ccugauccucccacagagccuguac

SEQ ID NO: 155 - RNA, 25 nt, Artificial Sequence
  Synthetic Construct
cccugauccucccacagagccugua

SEQ ID NO: 156 - RNA, 25 nt, Artificial Sequence
  Synthetic Construct
gcccugauccucccacagagccugu

SEQ ID NO: 157 - RNA, 25 nt, Artificial Sequence
  Synthetic Construct
agcccugauccucccacagagccug

SEQ ID NO: 158 - RNA, 25 nt, Artificial Sequence
  Synthetic Construct
cagcccugauccucccacagagccu

SEQ ID NO: 159 - RNA, 25 nt, Artificial Sequence
  Synthetic Construct
ccagcccugauccucccacagagcc

SEQ ID NO: 160 - RNA, 25 nt, Artificial Sequence
  Synthetic Construct
cccagcccugauccucccacagagc

SEQ ID NO: 161 - RNA, 25 nt, Artificial Sequence
  Synthetic Construct
ucccagcccugauccucccacagag

SEQ ID NO: 162 - RNA, 25 nt, Artificial Sequence
  Synthetic Construct
uucccagcccugauccucccacaga

SEQ ID NO: 163 - RNA, 25 nt, Artificial Sequence
  Synthetic Construct
guucccagcccugauccucccacag

SEQ ID NO: 164 - RNA, 25 nt, Artificial Sequence
  Synthetic Construct
aguucccagcccugauccucccaca

SEQ ID NO: 165 - RNA, 25 nt, Artificial Sequence
  Synthetic Construct
gaguucccagcccugauccucccac

SEQ ID NO: 166 - RNA, 25 nt, Artificial Sequence
  Synthetic Construct
agaguucccagcccugauccuccca

SEQ ID NO: 167 - RNA, 25 nt, Artificial Sequence
  Synthetic Construct
uagaguucccagcccugauccuccc

SEQ ID NO: 168 - RNA, 25 nt, Artificial Sequence
  Synthetic Construct
cuagaguucccagcccugauccucc

SEQ ID NO: 169 - RNA, 25 nt, Artificial Sequence
  Synthetic Construct
gcuagaguucccagcccugauccuc

SEQ ID NO: 170 - RNA, 25 nt, Artificial Sequence
  Synthetic Construct
ggcuagaguucccagcccugauccu

SEQ ID NO: 171 - RNA, 25 nt, Artificial Sequence
  Synthetic Construct
gggcuagaguucccagcccugaucc

SEQ ID NO: 172 - RNA, 25 nt, Artificial Sequence
  Synthetic Construct
agggcuagaguucccagcccugauc

SEQ ID NO: 173 - RNA, 25 nt, Artificial Sequence
  Synthetic Construct
cagggcuagaguucccagcccugau

SEQ ID NO: 174 - RNA, 25 nt, Artificial Sequence
  Synthetic Construct
ccagggcuagaguucccagcccuga

SEQ ID NO: 175 - RNA, 25 nt, Artificial Sequence
  Synthetic Construct
gccagggcuagaguucccagcccug

SEQ ID NO: 176 - RNA, 25 nt, Artificial Sequence
  Synthetic Construct
ggccagggcuagaguucccagcccu

SEQ ID NO: 177 - RNA, 25 nt, Artificial Sequence
  Synthetic Construct
gggccagggcuagaguucccagccc

SEQ ID NO: 178 - RNA, 25 nt, Artificial Sequence
  Synthetic Construct
agggccagggcuagaguucccagcc

SEQ ID NO: 179 - RNA, 25 nt, Artificial Sequence
  Synthetic Construct
cagggccagggcuagaguucccagc

SEQ ID NO: 180 - RNA, 25 nt, Artificial Sequence
  Synthetic Construct
ccagggccagggcuagaguucccag

SEQ ID NO: 181 - RNA, 25 nt, Artificial Sequence
  Synthetic Construct
cccagggccagggcuagaguuccca

SEQ ID NO: 182 - RNA, 25 nt, Artificial Sequence
  Synthetic Construct
ccccagggccagggcuagaguuccc

SEQ ID NO: 183 - RNA, 25 nt, Artificial Sequence
  Synthetic Construct
uccccagggccagggcuagaguucc

SEQ ID NO: 184 - RNA, 25 nt, Artificial Sequence
  Synthetic Construct
auccccagggccagggcuagaguuc

SEQ ID NO: 185 - RNA, 25 nt, Artificial Sequence
  Synthetic Construct
gauccccagggccagggcuagaguu

SEQ ID NO: 186 - RNA, 25 nt, Artificial Sequence
  Synthetic Construct
ggauccccagggccagggcuagagu

SEQ ID NO: 187 - RNA, 25 nt, Artificial Sequence
  Synthetic Construct
aggauccccagggccagggcuagag

SEQ ID NO: 188 - RNA, 25 nt, Artificial Sequence
  Synthetic Construct
caggauccccagggccagggcuaga

SEQ ID NO: 189 - RNA, 25 nt, Artificial Sequence
  Synthetic Construct
ccaggauccccagggccagggcuag

SEQ ID NO: 190 - RNA, 25 nt, Artificial Sequence
  Synthetic Construct
cccaggauccccagggccagggcua

SEQ ID NO: 191 - RNA, 25 nt, Artificial Sequence
  Synthetic Construct
ucccaggauccccagggccagggcu

SEQ ID NO: 192 - RNA, 25 nt, Artificial Sequence
  Synthetic Construct
cucccaggauccccagggccagggc

SEQ ID NO: 193 - RNA, 25 nt, Artificial Sequence
  Synthetic Construct
ccucccaggauccccagggccaggg

SEQ ID NO: 194 - RNA, 25 nt, Artificial Sequence
  Synthetic Construct
gccucccaggauccccagggccagg

SEQ ID NO: 195 - RNA, 25 nt, Artificial Sequence
  Synthetic Construct
ggccucccaggauccccagggccag

SEQ ID NO: 196 - RNA, 25 nt, Artificial Sequence
  Synthetic Construct
aggccucccaggauccccagggcca

SEQ ID NO: 197 - RNA, 25 nt, Artificial Sequence
  Synthetic Construct
caggccucccaggauccccagggcc

SEQ ID NO: 198 - RNA, 25 nt, Artificial Sequence
  Synthetic Construct
ccaggccucccaggauccccagggc

SEQ ID NO: 199 - RNA, 25 nt, Artificial Sequence
  Synthetic Construct
cccaggccucccaggauccccaggg

SEQ ID NO: 200 - RNA, 25 nt, Artificial Sequence
  Synthetic Construct
ccccaggccucccaggauccccagg

SEQ ID NO: 201 - RNA, 25 nt, Artificial Sequence
  Synthetic Construct
uccccaggccucccaggauccccag

SEQ ID NO: 202 - RNA, 25 nt, Artificial Sequence
  Synthetic Construct
guccccaggccucccaggaucccca

SEQ ID NO: 203 - RNA, 25 nt, Artificial Sequence
  Synthetic Construct
uguccccaggccucccaggaucccc

SEQ ID NO: 204 - RNA, 25 nt, Artificial Sequence
  Synthetic Construct
cuguccccaggccucccaggauccc

SEQ ID NO: 205 - RNA, 25 nt, Artificial Sequence
  Synthetic Construct
gcuguccccaggccucccaggaucc

SEQ ID NO: 206 - RNA, 25 nt, Artificial Sequence
  Synthetic Construct
ggcuguccccaggccucccaggauc

SEQ ID NO: 207 - RNA, 25 nt, Artificial Sequence
  Synthetic Construct
cggcuguccccaggccucccaggau

SEQ ID NO: 208 - RNA, 25 nt, Artificial Sequence
  Synthetic Construct
gcggcuguccccaggccucccagga

SEQ ID NO: 209 - RNA, 25 nt, Artificial Sequence
  Synthetic Construct
ggcggcuguccccaggccucccagg

SEQ ID NO: 210 - RNA, 25 nt, Artificial Sequence
  Synthetic Construct
gggcggcuguccccaggccucccag

SEQ ID NO: 211 - RNA, 25 nt, Artificial Sequence
  Synthetic Construct
agggcggcuguccccaggccuccca

SEQ ID NO: 212 - RNA, 25 nt, Artificial Sequence
  Synthetic Construct
cagggcggcuguccccaggccuccc

SEQ ID NO: 213 - RNA, 25 nt, Artificial Sequence
  Synthetic Construct
gcagggcggcuguccccaggccucc

SEQ ID NO: 214 - RNA, 25 nt, Artificial Sequence
  Synthetic Construct
agcagggcggcuguccccaggccuc

SEQ ID NO: 215 - RNA, 25 nt, Artificial Sequence
  Synthetic Construct
gagcagggcggcuguccccaggccu

SEQ ID NO: 216 - RNA, 25 nt, Artificial Sequence
  Synthetic Construct
ugagcagggcggcuguccccaggcc

SEQ ID NO: 217 - RNA, 25 nt, Artificial Sequence
  Synthetic Construct
augagcagggcggcuguccccaggc

SEQ ID NO: 218 - RNA, 25 nt, Artificial Sequence
  Synthetic Construct
aaugagcagggcggcuguccccagg

SEQ ID NO: 219 - RNA, 25 nt, Artificial Sequence
  Synthetic Construct
caaugagcagggcggcuguccccag

SEQ ID NO: 220 - RNA, 25 nt, Artificial Sequence
  Synthetic Construct
ccaaugagcagggcggcugucccca

SEQ ID NO: 221 - RNA, 25 nt, Artificial Sequence
  Synthetic Construct
cccaaugagcagggcggcugucccc

SEQ ID NO: 222 - RNA, 25 nt, Artificial Sequence
  Synthetic Construct
ccccaaugagcagggcggcuguccc

SEQ ID NO: 223 - RNA, 25 nt, Artificial Sequence
  Synthetic Construct
accccaaugagcagggcggcugucc

SEQ ID NO: 224 - RNA, 25 nt, Artificial Sequence
  Synthetic Construct
gaccccaaugagcagggcggcuguc

SEQ ID NO: 225 - RNA, 25 nt, Artificial Sequence
  Synthetic Construct
ugaccccaaugagcagggcggcugu

SEQ ID NO: 226 - RNA, 25 nt, Artificial Sequence
  Synthetic Construct
augaccccaaugagcagggcggcug

SEQ ID NO: 227 - RNA, 25 nt, Artificial Sequence
  Synthetic Construct
gaugaccccaaugagcagggcggcu

SEQ ID NO: 228 - RNA, 25 nt, Artificial Sequence
  Synthetic Construct
agaugaccccaaugagcagggcggc

SEQ ID NO: 229 - RNA, 25 nt, Artificial Sequence
  Synthetic Construct
aagaugaccccaaugagcagggcgg

SEQ ID NO: 230 - RNA, 25 nt, Artificial Sequence
  Synthetic Construct
caagaugaccccaaugagcagggcg

SEQ ID NO: 231 - RNA, 25 nt, Artificial Sequence
  Synthetic Construct
acaagaugaccccaaugagcagggc

SEQ ID NO: 232 - RNA, 25 nt, Artificial Sequence
  Synthetic Construct
cacaagaugaccccaaugagcaggg

SEQ ID NO: 233 - RNA, 25 nt, Artificial Sequence
  Synthetic Construct
ccacaagaugaccccaaugagcagg

SEQ ID NO: 234 - RNA, 25 nt, Artificial Sequence
  Synthetic Construct
gccacaagaugaccccaaugagcag

SEQ ID NO: 235 - RNA, 25 nt, Artificial Sequence
  Synthetic Construct
ugccacaagaugaccccaaugagca

SEQ ID NO: 236 - RNA, 25 nt, Artificial Sequence
  Synthetic Construct
uugccacaagaugaccccaaugagc

SEQ ID NO: 237 - RNA, 25 nt, Artificial Sequence
  Synthetic Construct
uuugccacaagaugaccccaaugag

SEQ ID NO: 238 - RNA, 25 nt, Artificial Sequence
  Synthetic Construct
cuuugccacaagaugaccccaauga

SEQ ID NO: 239 - RNA, 25 nt, Artificial Sequence
  Synthetic Construct
ccuuugccacaagaugaccccaaug

SEQ ID NO: 240 - RNA, 25 nt, Artificial Sequence
  Synthetic Construct
gccuuugccacaagaugaccccaau

SEQ ID NO: 241 - RNA, 25 nt, Artificial Sequence
  Synthetic Construct
cgccuuugccacaagaugaccccaa

SEQ ID NO: 242 - RNA, 25 nt, Artificial Sequence
  Synthetic Construct
ccgccuuugccacaagaugacccca

SEQ ID NO: 243 - RNA, 25 nt, Artificial Sequence
  Synthetic Construct
gccgccuuugccacaagaugacccc

SEQ ID NO: 244 - RNA, 25 nt, Artificial Sequence
  Synthetic Construct
ugccgccuuugccacaagaugaccc

SEQ ID NO: 245 - RNA, 25 nt, Artificial Sequence
  Synthetic Construct
uugccgccuuugccacaagaugacc

SEQ ID NO: 246 - RNA, 25 nt, Artificial Sequence
  Synthetic Construct
guugccgccuuugccacaagaugac

SEQ ID NO: 247 - RNA, 25 nt, Artificial Sequence
  Synthetic Construct
cguugccgccuuugccacaagauga

SEQ ID NO: 248 - RNA, 25 nt, Artificial Sequence
  Synthetic Construct
gcguugccgccuuugccacaagaug

SEQ ID NO: 249 - RNA, 25 nt, Artificial Sequence
  Synthetic Construct
ggcguugccgccuuugccacaagau

SEQ ID NO: 250 - RNA, 25 nt, Artificial Sequence
  Synthetic Construct
cggcguugccgccuuugccacaaga

SEQ ID NO: 251 - RNA, 25 nt, Artificial Sequence
  Synthetic Construct
ucggcguugccgccuuugccacaag

SEQ ID NO: 252 - RNA, 25 nt, Artificial Sequence
  Synthetic Construct
cucggcguugccgccuuugccacaa

SEQ ID NO: 253 - RNA, 25 nt, Artificial Sequence
  Synthetic Construct
ccucggcguugccgccuuugccaca

SEQ ID NO: 254 - RNA, 25 nt, Artificial Sequence
  Synthetic Construct
uccucggcguugccgccuuugccac

SEQ ID NO: 255 - RNA, 25 nt, Artificial Sequence
  Synthetic Construct
cuccucggcguugccgccuuugcca

SEQ ID NO: 256 - RNA, 25 nt, Artificial Sequence
  Synthetic Construct
ucuccucggcguugccgccuuugcc

SEQ ID NO: 257 - RNA, 25 nt, Artificial Sequence
  Synthetic Construct
cucuccucggcguugccgccuuugc

SEQ ID NO: 258 - RNA, 25 nt, Artificial Sequence
  Synthetic Construct
ccucuccucggcguugccgccuuug

SEQ ID NO: 259 - RNA, 25 nt, Artificial Sequence
  Synthetic Construct
uccucuccucggcguugccgccuuu

SEQ ID NO: 260 - RNA, 25 nt, Artificial Sequence
  Synthetic Construct
cuccucuccucggcguugccgccuu

SEQ ID NO: 261 - RNA, 25 nt, Artificial Sequence
  Synthetic Construct
ucuccucuccucggcguugccgccu

SEQ ID NO: 262 - RNA, 25 nt, Artificial Sequence
  Synthetic Construct
cucuccucuccucggcguugccgcc

SEQ ID NO: 263 - RNA, 24 nt, Artificial Sequence
  Synthetic Construct
caguuggccccuccucgccugguu

SEQ ID NO: 264 - RNA, 24 nt, Artificial Sequence
  Synthetic Construct
gcaguuggccccuccucgccuggu

SEQ ID NO: 265 - RNA, 24 nt, Artificial Sequence
  Synthetic Construct
ugcaguuggccccuccucgccugg

SEQ ID NO: 266 - RNA, 24 nt, Artificial Sequence
  Synthetic Construct
cugcaguuggccccuccucgccug

SEQ ID NO: 267 - RNA, 24 nt, Artificial Sequence
  Synthetic Construct
ccugcaguuggccccuccucgccu

SEQ ID NO: 268 - RNA, 24 nt, Artificial Sequence
  Synthetic Construct
accugcaguuggccccuccucgcc

SEQ ID NO: 269 - RNA, 24 nt, Artificial Sequence
  Synthetic Construct
caccugcaguuggccccuccucgc

SEQ ID NO: 270 - RNA, 24 nt, Artificial Sequence
  Synthetic Construct
ucaccugcaguuggccccuccucg

SEQ ID NO: 271 - RNA, 24 nt, Artificial Sequence
  Synthetic Construct
cucaccugcaguuggccccuccuc

SEQ ID NO: 272 - RNA, 24 nt, Artificial Sequence
  Synthetic Construct
ccucaccugcaguuggccccuccu

SEQ ID NO: 273 - RNA, 24 nt, Artificial Sequence
  Synthetic Construct
cccucaccugcaguuggccccucc

SEQ ID NO: 274 - RNA, 24 nt, Artificial Sequence
  Synthetic Construct
ccccucaccugcaguuggccccuc

SEQ ID NO: 275 - RNA, 24 nt, Artificial Sequence
  Synthetic Construct
accccucaccugcaguuggccccu

SEQ ID NO: 276 - RNA, 24 nt, Artificial Sequence
  Synthetic Construct
aaccccucaccugcaguuggcccc

SEQ ID NO: 277 - RNA, 24 nt, Artificial Sequence
  Synthetic Construct
aaaccccucaccugcaguuggccc

SEQ ID NO: 278 - RNA, 24 nt, Artificial Sequence
  Synthetic Construct
caaaccccucaccugcaguuggcc

SEQ ID NO: 279 - RNA, 24 nt, Artificial Sequence
  Synthetic Construct
ucaaaccccucaccugcaguuggc

SEQ ID NO: 280 - RNA, 24 nt, Artificial Sequence
  Synthetic Construct
aucaaaccccucaccugcaguugg

SEQ ID NO: 281 - RNA, 24 nt, Artificial Sequence
  Synthetic Construct
uaucaaaccccucaccugcaguug

SEQ ID NO: 282 - RNA, 24 nt, Artificial Sequence
  Synthetic Construct
uuaucaaaccccucaccugcaguu

SEQ ID NO: 283 - RNA, 24 nt, Artificial Sequence
  Synthetic Construct
uuuaucaaaccccucaccugcagu

SEQ ID NO: 284 - RNA, 24 nt, Artificial Sequence
  Synthetic Construct
cuuuaucaaaccccucaccugcag

SEQ ID NO: 285 - RNA, 24 nt, Artificial Sequence
  Synthetic Construct
acuuuaucaaaccccucaccugca

SEQ ID NO: 286 - RNA, 24 nt, Artificial Sequence
  Synthetic Construct
gacuuuaucaaaccccucaccugc

SEQ ID NO: 287 - RNA, 24 nt, Artificial Sequence
  Synthetic Construct
ugacuuuaucaaaccccucaccug

SEQ ID NO: 288 - RNA, 24 nt, Artificial Sequence
  Synthetic Construct
cugacuuuaucaaaccccucaccu

SEQ ID NO: 289 - RNA, 24 nt, Artificial Sequence
  Synthetic Construct
ccugacuuuaucaaaccccucacc

SEQ ID NO: 290 - RNA, 24 nt, Artificial Sequence
  Synthetic Construct
cccugacuuuaucaaaccccucac

SEQ ID NO: 291 - RNA, 24 nt, Artificial Sequence
  Synthetic Construct
ucccugacuuuaucaaaccccuca

SEQ ID NO: 292 - RNA, 24 nt, Artificial Sequence
  Synthetic Construct
uucccugacuuuaucaaaccccuc

SEQ ID NO: 293 - RNA, 24 nt, Artificial Sequence
  Synthetic Construct
cuucccugacuuuaucaaaccccu

SEQ ID NO: 294 - RNA, 24 nt, Artificial Sequence
  Synthetic Construct
gcuucccugacuuuaucaaacccc

SEQ ID NO: 295 - RNA, 24 nt, Artificial Sequence
  Synthetic Construct
ugcuucccugacuuuaucaaaccc

SEQ ID NO: 296 - RNA, 24 nt, Artificial Sequence
  Synthetic Construct
cugcuucccugacuuuaucaaacc

SEQ ID NO: 297 - RNA, 24 nt, Artificial Sequence
  Synthetic Construct
ucugcuucccugacuuuaucaaac

SEQ ID NO: 298 - RNA, 24 nt, Artificial Sequence
  Synthetic Construct
uucugcuucccugacuuuaucaaa

SEQ ID NO: 299 - RNA, 24 nt, Artificial Sequence
  Synthetic Construct
cuucugcuucccugacuuuaucaa

SEQ ID NO: 300 - RNA, 24 nt, Artificial Sequence
  Synthetic Construct
ucuucugcuucccugacuuuauca

SEQ ID NO: 301 - RNA, 24 nt, Artificial Sequence
  Synthetic Construct
aucuucugcuucccugacuuuauc

SEQ ID NO: 302 - RNA, 24 nt, Artificial Sequence
  Synthetic Construct
uaucuucugcuucccugacuuuau

SEQ ID NO: 303 - RNA, 24 nt, Artificial Sequence
  Synthetic Construct
cuaucuucugcuucccugacuuua

SEQ ID NO: 304 - RNA, 24 nt, Artificial Sequence
  Synthetic Construct
gcuaucuucugcuucccugacuuu

SEQ ID NO: 305 - RNA, 24 nt, Artificial Sequence
  Synthetic Construct
ggcuaucuucugcuucccugacuu

SEQ ID NO: 306 - RNA, 24 nt, Artificial Sequence
  Synthetic Construct
gggcuaucuucugcuucccugacu

SEQ ID NO: 307 - RNA, 24 nt, Artificial Sequence
  Synthetic Construct
ggggcuaucuucugcuucccugac

SEQ ID NO: 308 - RNA, 24 nt, Artificial Sequence
  Synthetic Construct
gggggcuaucuucugcuucccuga

SEQ ID NO: 309 - RNA, 24 nt, Artificial Sequence
  Synthetic Construct
ugggggcuaucuucugcuucccug

SEQ ID NO: 310 - RNA, 24 nt, Artificial Sequence
  Synthetic Construct
uugggggcuaucuucugcuucccu

SEQ ID NO: 311 - RNA, 24 nt, Artificial Sequence
  Synthetic Construct
guugggggcuaucuucugcuuccc

SEQ ID NO: 312 - RNA, 24 nt, Artificial Sequence
  Synthetic Construct
uguugggggcuaucuucugcuucc

SEQ ID NO: 313 - RNA, 24 nt, Artificial Sequence
  Synthetic Construct
guguugggggcuaucuucugcuuc

SEQ ID NO: 314 - RNA, 24 nt, Artificial Sequence
  Synthetic Construct
uguguugggggcuaucuucugcuu

SEQ ID NO: 315 - RNA, 24 nt, Artificial Sequence
  Synthetic Construct
auguguugggggcuaucuucugcu

SEQ ID NO: 316 - RNA, 24 nt, Artificial Sequence
  Synthetic Construct
cauguguugggggcuaucuucugc

SEQ ID NO: 317 - RNA, 24 nt, Artificial Sequence
  Synthetic Construct
acauguguugggggcuaucuucug

SEQ ID NO: 318 - RNA, 24 nt, Artificial Sequence
  Synthetic Construct
cacauguguugggggcuaucuucu

SEQ ID NO: 319 - RNA, 24 nt, Artificial Sequence
  Synthetic Construct
ucacauguguugggggcuaucuuc

SEQ ID NO: 320 - RNA, 24 nt, Artificial Sequence
  Synthetic Construct
gucacauguguugggggcuaucuu

SEQ ID NO: 321 - RNA, 24 nt, Artificial Sequence
  Synthetic Construct
agucacauguguugggggcuaucu

SEQ ID NO: 322 - RNA, 24 nt, Artificial Sequence
  Synthetic Construct
cagucacauguguugggggcuauc

SEQ ID NO: 323 - RNA, 24 nt, Artificial Sequence
  Synthetic Construct
ccagucacauguguugggggcuau

SEQ ID NO: 324 - RNA, 24 nt, Artificial Sequence
  Synthetic Construct
cccagucacauguguugggggcua

SEQ ID NO: 325 - RNA, 24 nt, Artificial Sequence
  Synthetic Construct
ccccagucacauguguugggggcu

SEQ ID NO: 326 - RNA, 24 nt, Artificial Sequence
  Synthetic Construct
cccccagucacauguguugggggc

SEQ ID NO: 327 - RNA, 24 nt, Artificial Sequence
  Synthetic Construct
ccccccagucacauguguuggggg

SEQ ID NO: 328 - RNA, 24 nt, Artificial Sequence
  Synthetic Construct
uccccccagucacauguguugggg

SEQ ID NO: 329 - RNA, 24 nt, Artificial Sequence
  Synthetic Construct
auccccccagucacauguguuggg

SEQ ID NO: 330 - RNA, 24 nt, Artificial Sequence
  Synthetic Construct
cauccccccagucacauguguugg

SEQ ID NO: 331 - RNA, 24 nt, Artificial Sequence
  Synthetic Construct
ccauccccccagucacauguguug

SEQ ID NO: 332 - RNA, 24 nt, Artificial Sequence
  Synthetic Construct
accauccccccagucacauguguu

SEQ ID NO: 333 - RNA, 24 nt, Artificial Sequence
  Synthetic Construct
gaccauccccccagucacaugugu

SEQ ID NO: 334 - RNA, 24 nt, Artificial Sequence
  Synthetic Construct
ugaccauccccccagucacaugug

SEQ ID NO: 335 - RNA, 24 nt, Artificial Sequence
  Synthetic Construct
uugaccauccccccagucacaugu

SEQ ID NO: 336 - RNA, 24 nt, Artificial Sequence
  Synthetic Construct
guugaccauccccccagucacaug

SEQ ID NO: 337 - RNA, 24 nt, Artificial Sequence
  Synthetic Construct
uguugaccauccccccagucacau

SEQ ID NO: 338 - RNA, 24 nt, Artificial Sequence
  Synthetic Construct
uuguugaccauccccccagucaca

SEQ ID NO: 339 - RNA, 24 nt, Artificial Sequence
  Synthetic Construct
cuuguugaccauccccccagucac

SEQ ID NO: 340 - RNA, 24 nt, Artificial Sequence
  Synthetic Construct
ucuuguugaccauccccccaguca

SEQ ID NO: 341 - RNA, 24 nt, Artificial Sequence
  Synthetic Construct
uucuuguugaccauccccccaguc

SEQ ID NO: 342 - RNA, 24 nt, Artificial Sequence
  Synthetic Construct
uuucuuguugaccauccccccagu

SEQ ID NO: 343 - RNA, 24 nt, Artificial Sequence
  Synthetic Construct
cuuucuuguugaccauccccccag

SEQ ID NO: 344 - RNA, 24 nt, Artificial Sequence
  Synthetic Construct
ccuuucuuguugaccaucccccca

SEQ ID NO: 345 - RNA, 24 nt, Artificial Sequence
  Synthetic Construct
uccuuucuuguugaccaucccccc

SEQ ID NO: 346 - RNA, 24 nt, Artificial Sequence
  Synthetic Construct
uuccuuucuuguugaccauccccc

SEQ ID NO: 347 - RNA, 24 nt, Artificial Sequence
  Synthetic Construct
auuccuuucuuguugaccaucccc

SEQ ID NO: 348 - RNA, 24 nt, Artificial Sequence
  Synthetic Construct
cauuccuuucuuguugaccauccc

SEQ ID NO: 349 - RNA, 24 nt, Artificial Sequence
  Synthetic Construct
ccauuccuuucuuguugaccaucc

SEQ ID NO: 350 - RNA, 24 nt, Artificial Sequence
  Synthetic Construct
accauuccuuucuuguugaccauc

SEQ ID NO: 351 - RNA, 24 nt, Artificial Sequence
  Synthetic Construct
caccauuccuuucuuguugaccau

SEQ ID NO: 352 - RNA, 24 nt, Artificial Sequence
  Synthetic Construct
ucaccauuccuuucuuguugacca

SEQ ID NO: 353 - RNA, 24 nt, Artificial Sequence
  Synthetic Construct
cucaccauuccuuucuuguugacc

SEQ ID NO: 354 - RNA, 24 nt, Artificial Sequence
  Synthetic Construct
acucaccauuccuuucuuguugac

SEQ ID NO: 355 - RNA, 24 nt, Artificial Sequence
  Synthetic Construct
cacucaccauuccuuucuuguuga

SEQ ID NO: 356 - RNA, 24 nt, Artificial Sequence
  Synthetic Construct
ccacucaccauuccuuucuuguug

SEQ ID NO: 357 - RNA, 24 nt, Artificial Sequence
  Synthetic Construct
accacucaccauuccuuucuuguu

SEQ ID NO: 358 - RNA, 24 nt, Artificial Sequence
  Synthetic Construct
caccacucaccauuccuuucuugu

SEQ ID NO: 359 - RNA, 24 nt, Artificial Sequence
  Synthetic Construct
ccaccacucaccauuccuuucuug

SEQ ID NO: 360 - RNA, 24 nt, Artificial Sequence
  Synthetic Construct
accaccacucaccauuccuuucuu

SEQ ID NO: 361 - RNA, 24 nt, Artificial Sequence
  Synthetic Construct
caccaccacucaccauuccuuucu

SEQ ID NO: 362 - RNA, 24 nt, Artificial Sequence
  Synthetic Construct
ccaccaccacucaccauuccuuuc

SEQ ID NO: 363 - RNA, 24 nt, Artificial Sequence
  Synthetic Construct
gccaccaccacucaccauuccuuu

SEQ ID NO: 364 - RNA, 24 nt, Artificial Sequence
  Synthetic Construct
agccaccaccacucaccauuccuu

SEQ ID NO: 365 - RNA, 24 nt, Artificial Sequence
  Synthetic Construct
cagccaccaccacucaccauuccu

SEQ ID NO: 366 - RNA, 24 nt, Artificial Sequence
  Synthetic Construct
acagccaccaccacucaccauucc

SEQ ID NO: 367 - RNA, 24 nt, Artificial Sequence
  Synthetic Construct
cacagccaccaccacucaccauuc

SEQ ID NO: 368 - RNA, 24 nt, Artificial Sequence
  Synthetic Construct
gcacagccaccaccacucaccauu

SEQ ID NO: 369 - RNA, 24 nt, Artificial Sequence
  Synthetic Construct
agcacagccaccaccacucaccau

SEQ ID NO: 370 - RNA, 24 nt, Artificial Sequence
  Synthetic Construct
gagcacagccaccaccacucacca

SEQ ID NO: 371 - RNA, 24 nt, Artificial Sequence
  Synthetic Construct
agagcacagccaccaccacucacc

SEQ ID NO: 372 - RNA, 24 nt, Artificial Sequence
  Synthetic Construct
gagagcacagccaccaccacucac

SEQ ID NO: 373 - RNA, 24 nt, Artificial Sequence
  Synthetic Construct
ugagagcacagccaccaccacuca

SEQ ID NO: 374 - RNA, 24 nt, Artificial Sequence
  Synthetic Construct
uugagagcacagccaccaccacuc

SEQ ID NO: 375 - RNA, 24 nt, Artificial Sequence
  Synthetic Construct
auugagagcacagccaccaccacu

SEQ ID NO: 376 - RNA, 24 nt, Artificial Sequence
  Synthetic Construct
aauugagagcacagccaccaccac

SEQ ID NO: 377 - RNA, 24 nt, Artificial Sequence
  Synthetic Construct
aaauugagagcacagccaccacca

SEQ ID NO: 378 - RNA, 24 nt, Artificial Sequence
  Synthetic Construct
aaaauugagagcacagccaccacc

SEQ ID NO: 379 - RNA, 24 nt, Artificial Sequence
  Synthetic Construct
gaaaauugagagcacagccaccac

SEQ ID NO: 380 - RNA, 24 nt, Artificial Sequence
  Synthetic Construct
ggaaaauugagagcacagccacca

SEQ ID NO: 381 - RNA, 24 nt, Artificial Sequence
  Synthetic Construct
gggaaaauugagagcacagccacc

SEQ ID NO: 382 - RNA, 24 nt, Artificial Sequence
  Synthetic Construct
agggaaaauugagagcacagccac

SEQ ID NO: 383 - RNA, 24 nt, Artificial Sequence
  Synthetic Construct
cagggaaaauugagagcacagcca

SEQ ID NO: 384 - RNA, 24 nt, Artificial Sequence
  Synthetic Construct
acagggaaaauugagagcacagcc

SEQ ID NO: 385 - RNA, 24 nt, Artificial Sequence
  Synthetic Construct
gacagggaaaauugagagcacagc

SEQ ID NO: 386 - RNA, 24 nt, Artificial Sequence
  Synthetic Construct
agacagggaaaauugagagcacag

SEQ ID NO: 387 - RNA, 24 nt, Artificial Sequence
  Synthetic Construct
gagacagggaaaauugagagcaca

SEQ ID NO: 388 - RNA, 24 nt, Artificial Sequence
  Synthetic Construct
ggagacagggaaaauugagagcac

SEQ ID NO: 389 - RNA, 24 nt, Artificial Sequence
  Synthetic Construct
cggagacagggaaaauugagagca

SEQ ID NO: 390 - RNA, 24 nt, Artificial Sequence
  Synthetic Construct
acggagacagggaaaauugagagc

SEQ ID NO: 391 - RNA, 24 nt, Artificial Sequence
  Synthetic Construct
uacggagacagggaaaauugagag

SEQ ID NO: 392 - RNA, 24 nt, Artificial Sequence
  Synthetic Construct
guacggagacagggaaaauugaga

SEQ ID NO: 393 - RNA, 24 nt, Artificial Sequence
  Synthetic Construct
uguacggagacagggaaaauugag

SEQ ID NO: 394 - RNA, 24 nt, Artificial Sequence
  Synthetic Construct
cuguacggagacagggaaaauuga

SEQ ID NO: 395 - RNA, 24 nt, Artificial Sequence
  Synthetic Construct
ccuguacggagacagggaaaauug

SEQ ID NO: 396 - RNA, 24 nt, Artificial Sequence
  Synthetic Construct
gccuguacggagacagggaaaauu

SEQ ID NO: 397 - RNA, 24 nt, Artificial Sequence
  Synthetic Construct
agccuguacggagacagggaaaau

SEQ ID NO: 398 - RNA, 24 nt, Artificial Sequence
  Synthetic Construct
gagccuguacggagacagggaaaa

SEQ ID NO: 399 - RNA, 24 nt, Artificial Sequence
  Synthetic Construct
agagccuguacggagacagggaaa

SEQ ID NO: 400 - RNA, 24 nt, Artificial Sequence
  Synthetic Construct
cagagccuguacggagacagggaa

SEQ ID NO: 401 - RNA, 24 nt, Artificial Sequence
  Synthetic Construct
acagagccuguacggagacaggga

SEQ ID NO: 402 - RNA, 24 nt, Artificial Sequence
  Synthetic Construct
cacagagccuguacggagacaggg

SEQ ID NO: 403 - RNA, 24 nt, Artificial Sequence
  Synthetic Construct
ccacagagccuguacggagacagg

SEQ ID NO: 404 - RNA, 24 nt, Artificial Sequence
  Synthetic Construct
cccacagagccuguacggagacag

SEQ ID NO: 405 - RNA, 24 nt, Artificial Sequence
  Synthetic Construct
ucccacagagccuguacggagaca

SEQ ID NO: 406 - RNA, 24 nt, Artificial Sequence
  Synthetic Construct
cucccacagagccuguacggagac

SEQ ID NO: 407 - RNA, 24 nt, Artificial Sequence
  Synthetic Construct
ccucccacagagccuguacggaga

SEQ ID NO: 408 - RNA, 24 nt, Artificial Sequence
  Synthetic Construct
uccucccacagagccuguacggag

SEQ ID NO: 409 - RNA, 24 nt, Artificial Sequence
  Synthetic Construct
auccucccacagagccuguacgga

SEQ ID NO: 410 - RNA, 24 nt, Artificial Sequence
  Synthetic Construct
gauccucccacagagccuguacgg

SEQ ID NO: 411 - RNA, 24 nt, Artificial Sequence
  Synthetic Construct
ugauccucccacagagccuguacg

SEQ ID NO: 412 - RNA, 24 nt, Artificial Sequence
  Synthetic Construct
cugauccucccacagagccuguac

SEQ ID NO: 413 - RNA, 24 nt, Artificial Sequence
  Synthetic Construct
ccugauccucccacagagccugua

SEQ ID NO: 414 - RNA, 24 nt, Artificial Sequence
  Synthetic Construct
cccugauccucccacagagccugu

SEQ ID NO: 415 - RNA, 24 nt, Artificial Sequence
  Synthetic Construct
gcccugauccucccacagagccug

SEQ ID NO: 416 - RNA, 24 nt, Artificial Sequence
  Synthetic Construct
agcccugauccucccacagagccu

SEQ ID NO: 417 - RNA, 24 nt, Artificial Sequence
  Synthetic Construct
cagcccugauccucccacagagcc

SEQ ID NO: 418 - RNA, 24 nt, Artificial Sequence
  Synthetic Construct
ccagcccugauccucccacagagc

SEQ ID NO: 419 - RNA, 24 nt, Artificial Sequence
  Synthetic Construct
cccagcccugauccucccacagag

SEQ ID NO: 420 - RNA, 24 nt, Artificial Sequence
  Synthetic Construct
ucccagcccugauccucccacaga

SEQ ID NO: 421 - RNA, 24 nt, Artificial Sequence
  Synthetic Construct
uucccagcccugauccucccacag

SEQ ID NO: 422 - RNA, 24 nt, Artificial Sequence
  Synthetic Construct
guucccagcccugauccucccaca

SEQ ID NO: 423 - RNA, 24 nt, Artificial Sequence
  Synthetic Construct
aguucccagcccugauccucccac

SEQ ID NO: 424 - RNA, 24 nt, Artificial Sequence
  Synthetic Construct
gaguucccagcccugauccuccca

SEQ ID NO: 425 - RNA, 24 nt, Artificial Sequence
  Synthetic Construct
agaguucccagcccugauccuccc

SEQ ID NO: 426 - RNA, 24 nt, Artificial Sequence
  Synthetic Construct
uagaguucccagcccugauccucc

SEQ ID NO: 427 - RNA, 24 nt, Artificial Sequence
  Synthetic Construct
cuagaguucccagcccugauccuc

SEQ ID NO: 428 - RNA, 24 nt, Artificial Sequence
  Synthetic Construct
gcuagaguucccagcccugauccu

SEQ ID NO: 429 - RNA, 24 nt, Artificial Sequence
  Synthetic Construct
ggcuagaguucccagcccugaucc

SEQ ID NO: 430 - RNA, 24 nt, Artificial Sequence
  Synthetic Construct
gggcuagaguucccagcccugauc

SEQ ID NO: 431 - RNA, 24 nt, Artificial Sequence
  Synthetic Construct
agggcuagaguucccagcccugau

SEQ ID NO: 432 - RNA, 24 nt, Artificial Sequence
  Synthetic Construct
cagggcuagaguucccagcccuga

SEQ ID NO: 433 - RNA, 24 nt, Artificial Sequence
  Synthetic Construct
ccagggcuagaguucccagcccug

SEQ ID NO: 434 - RNA, 24 nt, Artificial Sequence
  Synthetic Construct
gccagggcuagaguucccagcccu

SEQ ID NO: 435 - RNA, 24 nt, Artificial Sequence
  Synthetic Construct
ggccagggcuagaguucccagccc

SEQ ID NO: 436 - RNA, 24 nt, Artificial Sequence
  Synthetic Construct
gggccagggcuagaguucccagcc

SEQ ID NO: 437 - RNA, 24 nt, Artificial Sequence
  Synthetic Construct
agggccagggcuagaguucccagc

SEQ ID NO: 438 - RNA, 24 nt, Artificial Sequence
  Synthetic Construct
cagggccagggcuagaguucccag

SEQ ID NO: 439 - RNA, 24 nt, Artificial Sequence
  Synthetic Construct
ccagggccagggcuagaguuccca

SEQ ID NO: 440 - RNA, 24 nt, Artificial Sequence
  Synthetic Construct
cccagggccagggcuagaguuccc

SEQ ID NO: 441 - RNA, 24 nt, Artificial Sequence
  Synthetic Construct
ccccagggccagggcuagaguucc

SEQ ID NO: 442 - RNA, 24 nt, Artificial Sequence
  Synthetic Construct
uccccagggccagggcuagaguuc

SEQ ID NO: 443 - RNA, 24 nt, Artificial Sequence
  Synthetic Construct
auccccagggccagggcuagaguu

SEQ ID NO: 444 - RNA, 24 nt, Artificial Sequence
  Synthetic Construct
gauccccagggccagggcuagagu

SEQ ID NO: 445 - RNA, 24 nt, Artificial Sequence
  Synthetic Construct
ggauccccagggccagggcuagag

SEQ ID NO: 446 - RNA, 24 nt, Artificial Sequence
  Synthetic Construct
aggauccccagggccagggcuaga

SEQ ID NO: 447 - RNA, 24 nt, Artificial Sequence
  Synthetic Construct
caggauccccagggccagggcuag

SEQ ID NO: 448 - RNA, 24 nt, Artificial Sequence
  Synthetic Construct
ccaggauccccagggccagggcua

SEQ ID NO: 449 - RNA, 24 nt, Artificial Sequence
  Synthetic Construct
cccaggauccccagggccagggcu

SEQ ID NO: 450 - RNA, 24 nt, Artificial Sequence
  Synthetic Construct
ucccaggauccccagggccagggc

SEQ ID NO: 451 - RNA, 24 nt, Artificial Sequence
  Synthetic Construct
cucccaggauccccagggccaggg

SEQ ID NO: 452 - RNA, 24 nt, Artificial Sequence
  Synthetic Construct
ccucccaggauccccagggccagg

SEQ ID NO: 453 - RNA, 24 nt, Artificial Sequence
  Synthetic Construct
gccucccaggauccccagggccag

SEQ ID NO: 454 - RNA, 24 nt, Artificial Sequence
  Synthetic Construct
ggccucccaggauccccagggcca

SEQ ID NO: 455 - RNA, 24 nt, Artificial Sequence
  Synthetic Construct
aggccucccaggauccccagggcc

SEQ ID NO: 456 - RNA, 24 nt, Artificial Sequence
  Synthetic Construct
caggccucccaggauccccagggc

SEQ ID NO: 457 - RNA, 24 nt, Artificial Sequence
  Synthetic Construct
ccaggccucccaggauccccaggg

SEQ ID NO: 458 - RNA, 24 nt, Artificial Sequence
  Synthetic Construct
cccaggccucccaggauccccagg

SEQ ID NO: 459 - RNA, 24 nt, Artificial Sequence
  Synthetic Construct
ccccaggccucccaggauccccag

SEQ ID NO: 460 - RNA, 24 nt, Artificial Sequence
  Synthetic Construct
uccccaggccucccaggaucccca

SEQ ID NO: 461 - RNA, 24 nt, Artificial Sequence
  Synthetic Construct
guccccaggccucccaggaucccc

SEQ ID NO: 462 - RNA, 24 nt, Artificial Sequence
  Synthetic Construct
uguccccaggccucccaggauccc

SEQ ID NO: 463 - RNA, 24 nt, Artificial Sequence
  Synthetic Construct
cuguccccaggccucccaggaucc

SEQ ID NO: 464 - RNA, 24 nt, Artificial Sequence
  Synthetic Construct
gcuguccccaggccucccaggauc

SEQ ID NO: 465 - RNA, 24 nt, Artificial Sequence
  Synthetic Construct
ggcuguccccaggccucccaggau

SEQ ID NO: 466 - RNA, 24 nt, Artificial Sequence
  Synthetic Construct
cggcuguccccaggccucccagga

SEQ ID NO: 467 - RNA, 24 nt, Artificial Sequence
  Synthetic Construct
gcggcuguccccaggccucccagg

SEQ ID NO: 468 - RNA, 24 nt, Artificial Sequence
  Synthetic Construct
ggcggcuguccccaggccucccag

SEQ ID NO: 469 - RNA, 24 nt, Artificial Sequence
  Synthetic Construct
gggcggcuguccccaggccuccca

SEQ ID NO: 470 - RNA, 24 nt, Artificial Sequence
  Synthetic Construct
agggcggcuguccccaggccuccc

SEQ ID NO: 471 - RNA, 24 nt, Artificial Sequence
  Synthetic Construct
cagggcggcuguccccaggccucc

SEQ ID NO: 472 - RNA, 24 nt, Artificial Sequence
  Synthetic Construct
gcagggcggcuguccccaggccuc

SEQ ID NO: 473 - RNA, 24 nt, Artificial Sequence
  Synthetic Construct
agcagggcggcuguccccaggccu

SEQ ID NO: 474 - RNA, 24 nt, Artificial Sequence
  Synthetic Construct
gagcagggcggcuguccccaggcc

SEQ ID NO: 475 - RNA, 24 nt, Artificial Sequence
  Synthetic Construct
ugagcagggcggcuguccccaggc

SEQ ID NO: 476 - RNA, 24 nt, Artificial Sequence
  Synthetic Construct
augagcagggcggcuguccccagg

SEQ ID NO: 477 - RNA, 24 nt, Artificial Sequence
  Synthetic Construct
aaugagcagggcggcuguccccag

SEQ ID NO: 478 - RNA, 24 nt, Artificial Sequence
  Synthetic Construct
caaugagcagggcggcugucccca

SEQ ID NO: 479 - RNA, 24 nt, Artificial Sequence
  Synthetic Construct
ccaaugagcagggcggcugucccc

SEQ ID NO: 480 - RNA, 24 nt, Artificial Sequence
  Synthetic Construct
cccaaugagcagggcggcuguccc

SEQ ID NO: 481 - RNA, 24 nt, Artificial Sequence
  Synthetic Construct
ccccaaugagcagggcggcugucc

SEQ ID NO: 482 - RNA, 24 nt, Artificial Sequence
  Synthetic Construct
accccaaugagcagggcggcuguc

SEQ ID NO: 483 - RNA, 24 nt, Artificial Sequence
  Synthetic Construct
gaccccaaugagcagggcggcugu

SEQ ID NO: 484 - RNA, 24 nt, Artificial Sequence
  Synthetic Construct
ugaccccaaugagcagggcggcug

SEQ ID NO: 485 - RNA, 24 nt, Artificial Sequence
  Synthetic Construct
augaccccaaugagcagggcggcu

SEQ ID NO: 486 - RNA, 24 nt, Artificial Sequence
  Synthetic Construct
gaugaccccaaugagcagggcggc

SEQ ID NO: 487 - RNA, 24 nt, Artificial Sequence
  Synthetic Construct
agaugaccccaaugagcagggcgg

SEQ ID NO: 488 - RNA, 24 nt, Artificial Sequence
  Synthetic Construct
aagaugaccccaaugagcagggcg

SEQ ID NO: 489 - RNA, 24 nt, Artificial Sequence
  Synthetic Construct
caagaugaccccaaugagcagggc

SEQ ID NO: 490 - RNA, 24 nt, Artificial Sequence
  Synthetic Construct
acaagaugaccccaaugagcaggg

SEQ ID NO: 491 - RNA, 24 nt, Artificial Sequence
  Synthetic Construct
cacaagaugaccccaaugagcagg

SEQ ID NO: 492 - RNA, 24 nt, Artificial Sequence
  Synthetic Construct
ccacaagaugaccccaaugagcag

SEQ ID NO: 493 - RNA, 24 nt, Artificial Sequence
  Synthetic Construct
gccacaagaugaccccaaugagca

SEQ ID NO: 494 - RNA, 24 nt, Artificial Sequence
  Synthetic Construct
ugccacaagaugaccccaaugagc

SEQ ID NO: 495 - RNA, 24 nt, Artificial Sequence
  Synthetic Construct
uugccacaagaugaccccaaugag

SEQ ID NO: 496 - RNA, 24 nt, Artificial Sequence
  Synthetic Construct
uuugccacaagaugaccccaauga

SEQ ID NO: 497 - RNA, 24 nt, Artificial Sequence
  Synthetic Construct
cuuugccacaagaugaccccaaug

SEQ ID NO: 498 - RNA, 24 nt, Artificial Sequence
  Synthetic Construct
ccuuugccacaagaugaccccaau

SEQ ID NO: 499 - RNA, 24 nt, Artificial Sequence
  Synthetic Construct
gccuuugccacaagaugaccccaa

SEQ ID NO: 500 - RNA, 24 nt, Artificial Sequence
  Synthetic Construct
cgccuuugccacaagaugacccca

SEQ ID NO: 501 - RNA, 24 nt, Artificial Sequence
  Synthetic Construct
ccgccuuugccacaagaugacccc

SEQ ID NO: 502 - RNA, 24 nt, Artificial Sequence
  Synthetic Construct
gccgccuuugccacaagaugaccc

SEQ ID NO: 503 - RNA, 24 nt, Artificial Sequence
  Synthetic Construct
ugccgccuuugccacaagaugacc

SEQ ID NO: 504 - RNA, 24 nt, Artificial Sequence
  Synthetic Construct
uugccgccuuugccacaagaugac

SEQ ID NO: 505 - RNA, 24 nt, Artificial Sequence
  Synthetic Construct
guugccgccuuugccacaagauga

SEQ ID NO: 506 - RNA, 24 nt, Artificial Sequence
  Synthetic Construct
cguugccgccuuugccacaagaug

SEQ ID NO: 507 - RNA, 24 nt, Artificial Sequence
  Synthetic Construct
gcguugccgccuuugccacaagau

SEQ ID NO: 508 - RNA, 24 nt, Artificial Sequence
  Synthetic Construct
ggcguugccgccuuugccacaaga

SEQ ID NO: 509 - RNA, 24 nt, Artificial Sequence
  Synthetic Construct
cggcguugccgccuuugccacaag

SEQ ID NO: 510 - RNA, 24 nt, Artificial Sequence
  Synthetic Construct
ucggcguugccgccuuugccacaa

SEQ ID NO: 511 - RNA, 24 nt, Artificial Sequence
  Synthetic Construct
cucggcguugccgccuuugccaca

SEQ ID NO: 512 - RNA, 24 nt, Artificial Sequence
  Synthetic Construct
ccucggcguugccgccuuugccac

SEQ ID NO: 513 - RNA, 24 nt, Artificial Sequence
  Synthetic Construct
uccucggcguugccgccuuugcca

SEQ ID NO: 514 - RNA, 24 nt, Artificial Sequence
  Synthetic Construct
cuccucggcguugccgccuuugcc

SEQ ID NO: 515 - RNA, 24 nt, Artificial Sequence
  Synthetic Construct
ucuccucggcguugccgccuuugc

SEQ ID NO: 516 - RNA, 24 nt, Artificial Sequence
  Synthetic Construct
cucuccucggcguugccgccuuug

SEQ ID NO: 517 - RNA, 24 nt, Artificial Sequence
  Synthetic Construct
ccucuccucggcguugccgccuuu

SEQ ID NO: 518 - RNA, 24 nt, Artificial Sequence
  Synthetic Construct
uccucuccucggcguugccgccuu

SEQ ID NO: 519 - RNA, 24 nt, Artificial Sequence
  Synthetic Construct
cuccucuccucggcguugccgccu

SEQ ID NO: 520 - RNA, 24 nt, Artificial Sequence
  Synthetic Construct
ucuccucuccucggcguugccgcc

SEQ ID NO: 521 - RNA, 24 nt, Artificial Sequence
  Synthetic Construct
cucuccucuccucggcguugccgc

SEQ ID NO: 522 - RNA, 23 nt, Artificial Sequence
  Synthetic Construct
aguuggccccuccucgccugguu

SEQ ID NO: 523 - RNA, 23 nt, Artificial Sequence
  Synthetic Construct
caguuggccccuccucgccuggu

SEQ ID NO: 524 - RNA, 23 nt, Artificial Sequence
  Synthetic Construct
gcaguuggccccuccucgccugg

SEQ ID NO: 525 - RNA, 23 nt, Artificial Sequence
  Synthetic Construct
ugcaguuggccccuccucgccug

SEQ ID NO: 526 - RNA, 23 nt, Artificial Sequence
  Synthetic Construct
cugcaguuggccccuccucgccu

SEQ ID NO: 527 - RNA, 23 nt, Artificial Sequence
  Synthetic Construct
ccugcaguuggccccuccucgcc

SEQ ID NO: 528 - RNA, 23 nt, Artificial Sequence
  Synthetic Construct
accugcaguuggccccuccucgc

SEQ ID NO: 529 - RNA, 23 nt, Artificial Sequence
  Synthetic Construct
caccugcaguuggccccuccucg

SEQ ID NO: 530 - RNA, 23 nt, Artificial Sequence
  Synthetic Construct
ucaccugcaguuggccccuccuc

SEQ ID NO: 531 - RNA, 23 nt, Artificial Sequence
  Synthetic Construct
cucaccugcaguuggccccuccu

SEQ ID NO: 532 - RNA, 23 nt, Artificial Sequence
  Synthetic Construct
ccucaccugcaguuggccccucc

SEQ ID NO: 533 - RNA, 23 nt, Artificial Sequence
  Synthetic Construct
cccucaccugcaguuggccccuc

SEQ ID NO: 534 - RNA, 23 nt, Artificial Sequence
  Synthetic Construct
ccccucaccugcaguuggccccu

SEQ ID NO: 535 - RNA, 23 nt, Artificial Sequence
  Synthetic Construct
accccucaccugcaguuggcccc

SEQ ID NO: 536 - RNA, 23 nt, Artificial Sequence
  Synthetic Construct
aaccccucaccugcaguuggccc

SEQ ID NO: 537 - RNA, 23 nt, Artificial Sequence
  Synthetic Construct
aaaccccucaccugcaguuggcc

SEQ ID NO: 538 - RNA, 23 nt, Artificial Sequence
  Synthetic Construct
caaaccccucaccugcaguuggc

SEQ ID NO: 539 - RNA, 23 nt, Artificial Sequence
  Synthetic Construct
ucaaaccccucaccugcaguugg

SEQ ID NO: 540 - RNA, 23 nt, Artificial Sequence
  Synthetic Construct
aucaaaccccucaccugcaguug

SEQ ID NO: 541 - RNA, 23 nt, Artificial Sequence
  Synthetic Construct
uaucaaaccccucaccugcaguu

SEQ ID NO: 542 - RNA, 23 nt, Artificial Sequence
  Synthetic Construct
uuaucaaaccccucaccugcagu

SEQ ID NO: 543 - RNA, 23 nt, Artificial Sequence
  Synthetic Construct
uuuaucaaaccccucaccugcag

SEQ ID NO: 544 - RNA, 23 nt, Artificial Sequence
  Synthetic Construct
cuuuaucaaaccccucaccugca

SEQ ID NO: 545 - RNA, 23 nt, Artificial Sequence
  Synthetic Construct
acuuuaucaaaccccucaccugc

SEQ ID NO: 546 - RNA, 23 nt, Artificial Sequence
  Synthetic Construct
gacuuuaucaaaccccucaccug

SEQ ID NO: 547 - RNA, 23 nt, Artificial Sequence
  Synthetic Construct
ugacuuuaucaaaccccucaccu

SEQ ID NO: 548 - RNA, 23 nt, Artificial Sequence
  Synthetic Construct
cugacuuuaucaaaccccucacc

SEQ ID NO: 549 - RNA, 23 nt, Artificial Sequence
  Synthetic Construct
ccugacuuuaucaaaccccucac

SEQ ID NO: 550 - RNA, 23 nt, Artificial Sequence
  Synthetic Construct
cccugacuuuaucaaaccccuca

SEQ ID NO: 551 - RNA, 23 nt, Artificial Sequence
  Synthetic Construct
ucccugacuuuaucaaaccccuc

SEQ ID NO: 552 - RNA, 23 nt, Artificial Sequence
  Synthetic Construct
uucccugacuuuaucaaaccccu

SEQ ID NO: 553 - RNA, 23 nt, Artificial Sequence
  Synthetic Construct
cuucccugacuuuaucaaacccc

SEQ ID NO: 554 - RNA, 23 nt, Artificial Sequence
  Synthetic Construct
gcuucccugacuuuaucaaaccc

SEQ ID NO: 555 - RNA, 23 nt, Artificial Sequence
  Synthetic Construct
ugcuucccugacuuuaucaaacc

SEQ ID NO: 556 - RNA, 23 nt, Artificial Sequence
  Synthetic Construct
cugcuucccugacuuuaucaaac

SEQ ID NO: 557 - RNA, 23 nt, Artificial Sequence
  Synthetic Construct
ucugcuucccugacuuuaucaaa

SEQ ID NO: 558 - RNA, 23 nt, Artificial Sequence
  Synthetic Construct
uucugcuucccugacuuuaucaa

SEQ ID NO: 559 - RNA, 23 nt, Artificial Sequence
  Synthetic Construct
cuucugcuucccugacuuuauca

SEQ ID NO: 560 - RNA, 23 nt, Artificial Sequence
  Synthetic Construct
ucuucugcuucccugacuuuauc

SEQ ID NO: 561 - RNA, 23 nt, Artificial Sequence
  Synthetic Construct
aucuucugcuucccugacuuuau

SEQ ID NO: 562 - RNA, 23 nt, Artificial Sequence
  Synthetic Construct
uaucuucugcuucccugacuuua

SEQ ID NO: 563 - RNA, 23 nt, Artificial Sequence
  Synthetic Construct
cuaucuucugcuucccugacuuu

SEQ ID NO: 564 - RNA, 23 nt, Artificial Sequence
  Synthetic Construct
gcuaucuucugcuucccugacuu

SEQ ID NO: 565 - RNA, 23 nt, Artificial Sequence
  Synthetic Construct
ggcuaucuucugcuucccugacu

SEQ ID NO: 566 - RNA, 23 nt, Artificial Sequence
  Synthetic Construct
gggcuaucuucugcuucccugac

SEQ ID NO: 567 - RNA, 23 nt, Artificial Sequence
  Synthetic Construct
ggggcuaucuucugcuucccuga

SEQ ID NO: 568 - RNA, 23 nt, Artificial Sequence
  Synthetic Construct
gggggcuaucuucugcuucccug

SEQ ID NO: 569 - RNA, 23 nt, Artificial Sequence
  Synthetic Construct
ugggggcuaucuucugcuucccu

SEQ ID NO: 570 - RNA, 23 nt, Artificial Sequence
  Synthetic Construct
uugggggcuaucuucugcuuccc

SEQ ID NO: 571 - RNA, 23 nt, Artificial Sequence
  Synthetic Construct
guugggggcuaucuucugcuucc

SEQ ID NO: 572 - RNA, 23 nt, Artificial Sequence
  Synthetic Construct
uguugggggcuaucuucugcuuc

SEQ ID NO: 573 - RNA, 23 nt, Artificial Sequence
  Synthetic Construct
guguugggggcuaucuucugcuu

SEQ ID NO: 574 - RNA, 23 nt, Artificial Sequence
  Synthetic Construct
uguguugggggcuaucuucugcu

SEQ ID NO: 575 - RNA, 23 nt, Artificial Sequence
  Synthetic Construct
auguguugggggcuaucuucugc

SEQ ID NO: 576 - RNA, 23 nt, Artificial Sequence
  Synthetic Construct
cauguguugggggcuaucuucug

SEQ ID NO: 577 - RNA, 23 nt, Artificial Sequence
  Synthetic Construct
acauguguugggggcuaucuucu

SEQ ID NO: 578 - RNA, 23 nt, Artificial Sequence
  Synthetic Construct
cacauguguugggggcuaucuuc

SEQ ID NO: 579 - RNA, 23 nt, Artificial Sequence
  Synthetic Construct
ucacauguguugggggcuaucuu

SEQ ID NO: 580 - RNA, 23 nt, Artificial Sequence
  Synthetic Construct
gucacauguguugggggcuaucu

SEQ ID NO: 581 - RNA, 23 nt, Artificial Sequence
  Synthetic Construct
agucacauguguugggggcuauc

SEQ ID NO: 582 - RNA, 23 nt, Artificial Sequence
  Synthetic Construct
cagucacauguguugggggcuau

SEQ ID NO: 583 - RNA, 23 nt, Artificial Sequence
  Synthetic Construct
ccagucacauguguugggggcua

SEQ ID NO: 584 - RNA, 23 nt, Artificial Sequence
  Synthetic Construct
cccagucacauguguugggggcu

SEQ ID NO: 585 - RNA, 23 nt, Artificial Sequence
  Synthetic Construct
ccccagucacauguguugggggc

SEQ ID NO: 586 - RNA, 23 nt, Artificial Sequence
  Synthetic Construct
cccccagucacauguguuggggg

SEQ ID NO: 587 - RNA, 23 nt, Artificial Sequence
  Synthetic Construct
ccccccagucacauguguugggg

SEQ ID NO: 588 - RNA, 23 nt, Artificial Sequence
  Synthetic Construct
uccccccagucacauguguuggg

SEQ ID NO: 589 - RNA, 23 nt, Artificial Sequence
  Synthetic Construct
auccccccagucacauguguugg

SEQ ID NO: 590 - RNA, 23 nt, Artificial Sequence
  Synthetic Construct
cauccccccagucacauguguug

SEQ ID NO: 591 - RNA, 23 nt, Artificial Sequence
  Synthetic Construct
ccauccccccagucacauguguu

SEQ ID NO: 592 - RNA, 23 nt, Artificial Sequence
  Synthetic Construct
accauccccccagucacaugugu

SEQ ID NO: 593 - RNA, 23 nt, Artificial Sequence
  Synthetic Construct
gaccauccccccagucacaugug

SEQ ID NO: 594 - RNA, 23 nt, Artificial Sequence
  Synthetic Construct
ugaccauccccccagucacaugu

SEQ ID NO: 595 - RNA, 23 nt, Artificial Sequence
  Synthetic Construct
uugaccauccccccagucacaug

SEQ ID NO: 596 - RNA, 23 nt, Artificial Sequence
  Synthetic Construct
guugaccauccccccagucacau

SEQ ID NO: 597 - RNA, 23 nt, Artificial Sequence
  Synthetic Construct
uguugaccauccccccagucaca

SEQ ID NO: 598 - RNA, 23 nt, Artificial Sequence
  Synthetic Construct
uuguugaccauccccccagucac

SEQ ID NO: 599 - RNA, 23 nt, Artificial Sequence
  Synthetic Construct
cuuguugaccauccccccaguca

SEQ ID NO: 600 - RNA, 23 nt, Artificial Sequence
  Synthetic Construct
ucuuguugaccauccccccaguc

SEQ ID NO: 601 - RNA, 23 nt, Artificial Sequence
  Synthetic Construct
uucuuguugaccauccccccagu

SEQ ID NO: 602 - RNA, 23 nt, Artificial Sequence
  Synthetic Construct
uuucuuguugaccauccccccag

SEQ ID NO: 603 - RNA, 23 nt, Artificial Sequence
  Synthetic Construct
cuuucuuguugaccaucccccca

SEQ ID NO: 604 - RNA, 23 nt, Artificial Sequence
  Synthetic Construct
ccuuucuuguugaccaucccccc

SEQ ID NO: 605 - RNA, 23 nt, Artificial Sequence
  Synthetic Construct
uccuuucuuguugaccauccccc

SEQ ID NO: 606 - RNA, 23 nt, Artificial Sequence
  Synthetic Construct
uuccuuucuuguugaccaucccc

SEQ ID NO: 607 - RNA, 23 nt, Artificial Sequence
  Synthetic Construct
auuccuuucuuguugaccauccc

SEQ ID NO: 608 - RNA, 23 nt, Artificial Sequence
  Synthetic Construct
cauuccuuucuuguugaccaucc

SEQ ID NO: 609 - RNA, 23 nt, Artificial Sequence
  Synthetic Construct
ccauuccuuucuuguugaccauc

SEQ ID NO: 610 - RNA, 23 nt, Artificial Sequence
  Synthetic Construct
accauuccuuucuuguugaccau

SEQ ID NO: 611 - RNA, 23 nt, Artificial Sequence
  Synthetic Construct
caccauuccuuucuuguugacca

SEQ ID NO: 612 - RNA, 23 nt, Artificial Sequence
  Synthetic Construct
ucaccauuccuuucuuguugacc

SEQ ID NO: 613 - RNA, 23 nt, Artificial Sequence
  Synthetic Construct
cucaccauuccuuucuuguugac

SEQ ID NO: 614 - RNA, 23 nt, Artificial Sequence
  Synthetic Construct
acucaccauuccuuucuuguuga

SEQ ID NO: 615 - RNA, 23 nt, Artificial Sequence
  Synthetic Construct
cacucaccauuccuuucuuguug

SEQ ID NO: 616 - RNA, 23 nt, Artificial Sequence
  Synthetic Construct
ccacucaccauuccuuucuuguu

SEQ ID NO: 617 - RNA, 23 nt, Artificial Sequence
  Synthetic Construct
accacucaccauuccuuucuugu

SEQ ID NO: 618 - RNA, 23 nt, Artificial Sequence
  Synthetic Construct
caccacucaccauuccuuucuug

SEQ ID NO: 619 - RNA, 23 nt, Artificial Sequence
  Synthetic Construct
ccaccacucaccauuccuuucuu

SEQ ID NO: 620 - RNA, 23 nt, Artificial Sequence
  Synthetic Construct
accaccacucaccauuccuuucu

SEQ ID NO: 621 - RNA, 23 nt, Artificial Sequence
  Synthetic Construct
caccaccacucaccauuccuuuc

SEQ ID NO: 622 - RNA, 23 nt, Artificial Sequence
  Synthetic Construct
ccaccaccacucaccauuccuuu

SEQ ID NO: 623 - RNA, 23 nt, Artificial Sequence
  Synthetic Construct
gccaccaccacucaccauuccuu

SEQ ID NO: 624 - RNA, 23 nt, Artificial Sequence
  Synthetic Construct
agccaccaccacucaccauuccu

SEQ ID NO: 625 - RNA, 23 nt, Artificial Sequence
  Synthetic Construct
cagccaccaccacucaccauucc

SEQ ID NO: 626 - RNA, 23 nt, Artificial Sequence
  Synthetic Construct
acagccaccaccacucaccauuc

SEQ ID NO: 627 - RNA, 23 nt, Artificial Sequence
  Synthetic Construct
cacagccaccaccacucaccauu

SEQ ID NO: 628 - RNA, 23 nt, Artificial Sequence
  Synthetic Construct
gcacagccaccaccacucaccau

SEQ ID NO: 629 - RNA, 23 nt, Artificial Sequence
  Synthetic Construct
agcacagccaccaccacucacca

SEQ ID NO: 630 - RNA, 23 nt, Artificial Sequence
  Synthetic Construct
gagcacagccaccaccacucacc

SEQ ID NO: 631 - RNA, 23 nt, Artificial Sequence
  Synthetic Construct
agagcacagccaccaccacucac

SEQ ID NO: 632 - RNA, 23 nt, Artificial Sequence
  Synthetic Construct
gagagcacagccaccaccacuca

SEQ ID NO: 633 - RNA, 23 nt, Artificial Sequence
  Synthetic Construct
ugagagcacagccaccaccacuc

SEQ ID NO: 634 - RNA, 23 nt, Artificial Sequence
  Synthetic Construct
uugagagcacagccaccaccacu

SEQ ID NO: 635 - RNA, 23 nt, Artificial Sequence
  Synthetic Construct
auugagagcacagccaccaccac

SEQ ID NO: 636 - RNA, 23 nt, Artificial Sequence
  Synthetic Construct
aauugagagcacagccaccacca

SEQ ID NO: 637 - RNA, 23 nt, Artificial Sequence
  Synthetic Construct
aaauugagagcacagccaccacc

SEQ ID NO: 638 - RNA, 23 nt, Artificial Sequence
  Synthetic Construct
aaaauugagagcacagccaccac

SEQ ID NO: 639 - RNA, 23 nt, Artificial Sequence
  Synthetic Construct
gaaaauugagagcacagccacca

SEQ ID NO: 640 - RNA, 23 nt, Artificial Sequence
  Synthetic Construct
ggaaaauugagagcacagccacc

SEQ ID NO: 641 - RNA, 23 nt, Artificial Sequence
  Synthetic Construct
gggaaaauugagagcacagccac

SEQ ID NO: 642 - RNA, 23 nt, Artificial Sequence
  Synthetic Construct
agggaaaauugagagcacagcca

SEQ ID NO: 643 - RNA, 23 nt, Artificial Sequence
  Synthetic Construct
cagggaaaauugagagcacagcc

SEQ ID NO: 644 - RNA, 23 nt, Artificial Sequence
  Synthetic Construct
acagggaaaauugagagcacagc

SEQ ID NO: 645 - RNA, 23 nt, Artificial Sequence
  Synthetic Construct
gacagggaaaauugagagcacag

SEQ ID NO: 646 - RNA, 23 nt, Artificial Sequence
  Synthetic Construct
agacagggaaaauugagagcaca

SEQ ID NO: 647 - RNA, 23 nt, Artificial Sequence
  Synthetic Construct
gagacagggaaaauugagagcac

SEQ ID NO: 648 - RNA, 23 nt, Artificial Sequence
  Synthetic Construct
ggagacagggaaaauugagagca

SEQ ID NO: 649 - RNA, 23 nt, Artificial Sequence
  Synthetic Construct
cggagacagggaaaauugagagc

SEQ ID NO: 650 - RNA, 23 nt, Artificial Sequence
  Synthetic Construct
acggagacagggaaaauugagag

SEQ ID NO: 651 - RNA, 23 nt, Artificial Sequence
  Synthetic Construct
uacggagacagggaaaauugaga

SEQ ID NO: 652 - RNA, 23 nt, Artificial Sequence
  Synthetic Construct
guacggagacagggaaaauugag

SEQ ID NO: 653 - RNA, 23 nt, Artificial Sequence
  Synthetic Construct
uguacggagacagggaaaauuga

SEQ ID NO: 654 - RNA, 23 nt, Artificial Sequence
  Synthetic Construct
cuguacggagacagggaaaauug

SEQ ID NO: 655 - RNA, 23 nt, Artificial Sequence
  Synthetic Construct
ccuguacggagacagggaaaauu

SEQ ID NO: 656 - RNA, 23 nt, Artificial Sequence
  Synthetic Construct
gccuguacggagacagggaaaau

SEQ ID NO: 657 - RNA, 23 nt, Artificial Sequence
  Synthetic Construct
agccuguacggagacagggaaaa

SEQ ID NO: 658 - RNA, 23 nt, Artificial Sequence
  Synthetic Construct
gagccuguacggagacagggaaa

SEQ ID NO: 659 - RNA, 23 nt, Artificial Sequence
  Synthetic Construct
agagccuguacggagacagggaa

SEQ ID NO: 660 - RNA, 23 nt, Artificial Sequence
  Synthetic Construct
cagagccuguacggagacaggga

SEQ ID NO: 661 - RNA, 23 nt, Artificial Sequence
  Synthetic Construct
acagagccuguacggagacaggg

SEQ ID NO: 662 - RNA, 23 nt, Artificial Sequence
  Synthetic Construct
cacagagccuguacggagacagg

SEQ ID NO: 663 - RNA, 23 nt, Artificial Sequence
  Synthetic Construct
ccacagagccuguacggagacag

SEQ ID NO: 664 - RNA, 23 nt, Artificial Sequence
  Synthetic Construct
cccacagagccuguacggagaca

SEQ ID NO: 665 - RNA, 23 nt, Artificial Sequence
  Synthetic Construct
ucccacagagccuguacggagac

SEQ ID NO: 666 - RNA, 23 nt, Artificial Sequence
  Synthetic Construct
cucccacagagccuguacggaga

SEQ ID NO: 667 - RNA, 23 nt, Artificial Sequence
  Synthetic Construct
ccucccacagagccuguacggag

SEQ ID NO: 668 - RNA, 23 nt, Artificial Sequence
  Synthetic Construct
uccucccacagagccuguacgga

SEQ ID NO: 669 - RNA, 23 nt, Artificial Sequence
  Synthetic Construct
auccucccacagagccuguacgg

SEQ ID NO: 670 - RNA, 23 nt, Artificial Sequence
  Synthetic Construct
gauccucccacagagccuguacg

SEQ ID NO: 671 - RNA, 23 nt, Artificial Sequence
  Synthetic Construct
ugauccucccacagagccuguac

SEQ ID NO: 672 - RNA, 23 nt, Artificial Sequence
  Synthetic Construct
cugauccucccacagagccugua

SEQ ID NO: 673 - RNA, 23 nt, Artificial Sequence
  Synthetic Construct
ccugauccucccacagagccugu

SEQ ID NO: 674 - RNA, 23 nt, Artificial Sequence
  Synthetic Construct
cccugauccucccacagagccug

SEQ ID NO: 675 - RNA, 23 nt, Artificial Sequence
  Synthetic Construct
gcccugauccucccacagagccu

SEQ ID NO: 676 - RNA, 23 nt, Artificial Sequence
  Synthetic Construct
agcccugauccucccacagagcc

SEQ ID NO: 677 - RNA, 23 nt, Artificial Sequence
  Synthetic Construct
cagcccugauccucccacagagc

SEQ ID NO: 678 - RNA, 23 nt, Artificial Sequence
  Synthetic Construct
ccagcccugauccucccacagag

SEQ ID NO: 679 - RNA, 23 nt, Artificial Sequence
  Synthetic Construct
cccagcccugauccucccacaga

SEQ ID NO: 680 - RNA, 23 nt, Artificial Sequence
  Synthetic Construct
ucccagcccugauccucccacag

SEQ ID NO: 681 - RNA, 23 nt, Artificial Sequence
  Synthetic Construct
uucccagcccugauccucccaca

SEQ ID NO: 682 - RNA, 23 nt, Artificial Sequence
  Synthetic Construct
guucccagcccugauccucccac

SEQ ID NO: 683 - RNA, 23 nt, Artificial Sequence
  Synthetic Construct
aguucccagcccugauccuccca

SEQ ID NO: 684 - RNA, 23 nt, Artificial Sequence
  Synthetic Construct
gaguucccagcccugauccuccc

SEQ ID NO: 685 - RNA, 23 nt, Artificial Sequence
  Synthetic Construct
agaguucccagcccugauccucc

SEQ ID NO: 686 - RNA, 23 nt, Artificial Sequence
  Synthetic Construct
uagaguucccagcccugauccuc

SEQ ID NO: 687 - RNA, 23 nt, Artificial Sequence
  Synthetic Construct
cuagaguucccagcccugauccu

SEQ ID NO: 688 - RNA, 23 nt, Artificial Sequence
  Synthetic Construct
gcuagaguucccagcccugaucc

SEQ ID NO: 689 - RNA, 23 nt, Artificial Sequence
  Synthetic Construct
ggcuagaguucccagcccugauc

SEQ ID NO: 690 - RNA, 23 nt, Artificial Sequence
  Synthetic Construct
gggcuagaguucccagcccugau

SEQ ID NO: 691 - RNA, 23 nt, Artificial Sequence
  Synthetic Construct
agggcuagaguucccagcccuga

SEQ ID NO: 692 - RNA, 23 nt, Artificial Sequence
  Synthetic Construct
cagggcuagaguucccagcccug

SEQ ID NO: 693 - RNA, 23 nt, Artificial Sequence
  Synthetic Construct
ccagggcuagaguucccagcccu

SEQ ID NO: 694 - RNA, 23 nt, Artificial Sequence
  Synthetic Construct
gccagggcuagaguucccagccc

SEQ ID NO: 695 - RNA, 23 nt, Artificial Sequence
  Synthetic Construct
ggccagggcuagaguucccagcc

SEQ ID NO: 696 - RNA, 23 nt, Artificial Sequence
  Synthetic Construct
gggccagggcuagaguucccagc

SEQ ID NO: 697 - RNA, 23 nt, Artificial Sequence
  Synthetic Construct
agggccagggcuagaguucccag

SEQ ID NO: 698 - RNA, 23 nt, Artificial Sequence
  Synthetic Construct
cagggccagggcuagaguuccca

SEQ ID NO: 699 - RNA, 23 nt, Artificial Sequence
  Synthetic Construct
ccagggccagggcuagaguuccc

SEQ ID NO: 700 - RNA, 23 nt, Artificial Sequence
  Synthetic Construct
cccagggccagggcuagaguucc

SEQ ID NO: 701 - RNA, 23 nt, Artificial Sequence
  Synthetic Construct
ccccagggccagggcuagaguuc

SEQ ID NO: 702 - RNA, 23 nt, Artificial Sequence
  Synthetic Construct
uccccagggccagggcuagaguu

SEQ ID NO: 703 - RNA, 23 nt, Artificial Sequence
  Synthetic Construct
auccccagggccagggcuagagu

SEQ ID NO: 704 - RNA, 23 nt, Artificial Sequence
  Synthetic Construct
gauccccagggccagggcuagag

SEQ ID NO: 705 - RNA, 23 nt, Artificial Sequence
  Synthetic Construct
ggauccccagggccagggcuaga

SEQ ID NO: 706 - RNA, 23 nt, Artificial Sequence
  Synthetic Construct
aggauccccagggccagggcuag

SEQ ID NO: 707 - RNA, 23 nt, Artificial Sequence
  Synthetic Construct
caggauccccagggccagggcua

SEQ ID NO: 708 - RNA, 23 nt, Artificial Sequence
  Synthetic Construct
ccaggauccccagggccagggcu

SEQ ID NO: 709 - RNA, 23 nt, Artificial Sequence
  Synthetic Construct
cccaggauccccagggccagggc

SEQ ID NO: 710 - RNA, 23 nt, Artificial Sequence
  Synthetic Construct
ucccaggauccccagggccaggg

SEQ ID NO: 711 - RNA, 23 nt, Artificial Sequence
  Synthetic Construct
cucccaggauccccagggccagg

SEQ ID NO: 712 - RNA, 23 nt, Artificial Sequence
  Synthetic Construct
ccucccaggauccccagggccag

SEQ ID NO: 713 - RNA, 23 nt, Artificial Sequence
  Synthetic Construct
gccucccaggauccccagggcca

SEQ ID NO: 714 - RNA, 23 nt, Artificial Sequence
  Synthetic Construct
ggccucccaggauccccagggcc

SEQ ID NO: 715 - RNA, 23 nt, Artificial Sequence
  Synthetic Construct
aggccucccaggauccccagggc

SEQ ID NO: 716 - RNA, 23 nt, Artificial Sequence
  Synthetic Construct
caggccucccaggauccccaggg

SEQ ID NO: 717 - RNA, 23 nt, Artificial Sequence
  Synthetic Construct
ccaggccucccaggauccccagg

SEQ ID NO: 718 - RNA, 23 nt, Artificial Sequence
  Synthetic Construct
cccaggccucccaggauccccag

SEQ ID NO: 719 - RNA, 23 nt, Artificial Sequence
  Synthetic Construct
ccccaggccucccaggaucccca

SEQ ID NO: 720 - RNA, 23 nt, Artificial Sequence
  Synthetic Construct
uccccaggccucccaggaucccc

SEQ ID NO: 721 - RNA, 23 nt, Artificial Sequence
  Synthetic Construct
guccccaggccucccaggauccc

SEQ ID NO: 722 - RNA, 23 nt, Artificial Sequence
  Synthetic Construct
uguccccaggccucccaggaucc

SEQ ID NO: 723 - RNA, 23 nt, Artificial Sequence
  Synthetic Construct
cuguccccaggccucccaggauc

SEQ ID NO: 724 - RNA, 23 nt, Artificial Sequence
  Synthetic Construct
gcuguccccaggccucccaggau

SEQ ID NO: 725 - RNA, 23 nt, Artificial Sequence
  Synthetic Construct
ggcuguccccaggccucccagga

SEQ ID NO: 726 - RNA, 23 nt, Artificial Sequence
  Synthetic Construct
cggcuguccccaggccucccagg

SEQ ID NO: 727 - RNA, 23 nt, Artificial Sequence
  Synthetic Construct
gcggcuguccccaggccucccag

SEQ ID NO: 728 - RNA, 23 nt, Artificial Sequence
  Synthetic Construct
ggcggcuguccccaggccuccca

SEQ ID NO: 729 - RNA, 23 nt, Artificial Sequence
  Synthetic Construct
gggcggcuguccccaggccuccc

SEQ ID NO: 730 - RNA, 23 nt, Artificial Sequence
  Synthetic Construct
agggcggcuguccccaggccucc

SEQ ID NO: 731 - RNA, 23 nt, Artificial Sequence
  Synthetic Construct
cagggcggcuguccccaggccuc

SEQ ID NO: 732 - RNA, 23 nt, Artificial Sequence
  Synthetic Construct
gcagggcggcuguccccaggccu

SEQ ID NO: 733 - RNA, 23 nt, Artificial Sequence
  Synthetic Construct
agcagggcggcuguccccaggcc

SEQ ID NO: 734 - RNA, 23 nt, Artificial Sequence
  Synthetic Construct
gagcagggcggcuguccccaggc

SEQ ID NO: 735 - RNA, 23 nt, Artificial Sequence
  Synthetic Construct
ugagcagggcggcuguccccagg

SEQ ID NO: 736 - RNA, 23 nt, Artificial Sequence
  Synthetic Construct
augagcagggcggcuguccccag

SEQ ID NO: 737 - RNA, 23 nt, Artificial Sequence
  Synthetic Construct
aaugagcagggcggcugucccca

SEQ ID NO: 738 - RNA, 23 nt, Artificial Sequence
  Synthetic Construct
caaugagcagggcggcugucccc

SEQ ID NO: 739 - RNA, 23 nt, Artificial Sequence
  Synthetic Construct
ccaaugagcagggcggcuguccc

SEQ ID NO: 740 - RNA, 23 nt, Artificial Sequence
  Synthetic Construct
cccaaugagcagggcggcugucc

SEQ ID NO: 741 - RNA, 23 nt, Artificial Sequence
  Synthetic Construct
ccccaaugagcagggcggcuguc

SEQ ID NO: 742 - RNA, 23 nt, Artificial Sequence
  Synthetic Construct
accccaaugagcagggcggcugu

SEQ ID NO: 743 - RNA, 23 nt, Artificial Sequence
  Synthetic Construct
gaccccaaugagcagggcggcug

SEQ ID NO: 744 - RNA, 23 nt, Artificial Sequence
  Synthetic Construct
ugaccccaaugagcagggcggcu

SEQ ID NO: 745 - RNA, 23 nt, Artificial Sequence
  Synthetic Construct
augaccccaaugagcagggcggc

SEQ ID NO: 746 - RNA, 23 nt, Artificial Sequence
  Synthetic Construct
gaugaccccaaugagcagggcgg

SEQ ID NO: 747 - RNA, 23 nt, Artificial Sequence
  Synthetic Construct
agaugaccccaaugagcagggcg

SEQ ID NO: 748 - RNA, 23 nt, Artificial Sequence
  Synthetic Construct
aagaugaccccaaugagcagggc

SEQ ID NO: 749 - RNA, 23 nt, Artificial Sequence
  Synthetic Construct
caagaugaccccaaugagcaggg

SEQ ID NO: 750 - RNA, 23 nt, Artificial Sequence
  Synthetic Construct
acaagaugaccccaaugagcagg

SEQ ID NO: 751 - RNA, 23 nt, Artificial Sequence
  Synthetic Construct
cacaagaugaccccaaugagcag

SEQ ID NO: 752 - RNA, 23 nt, Artificial Sequence
  Synthetic Construct
ccacaagaugaccccaaugagca

SEQ ID NO: 753 - RNA, 23 nt, Artificial Sequence
  Synthetic Construct
gccacaagaugaccccaaugagc

SEQ ID NO: 754 - RNA, 23 nt, Artificial Sequence
  Synthetic Construct
ugccacaagaugaccccaaugag

SEQ ID NO: 755 - RNA, 23 nt, Artificial Sequence
  Synthetic Construct
uugccacaagaugaccccaauga

SEQ ID NO: 756 - RNA, 23 nt, Artificial Sequence
  Synthetic Construct
uuugccacaagaugaccccaaug

SEQ ID NO: 757 - RNA, 23 nt, Artificial Sequence
  Synthetic Construct
cuuugccacaagaugaccccaau

SEQ ID NO: 758 - RNA, 23 nt, Artificial Sequence
  Synthetic Construct
ccuuugccacaagaugaccccaa

SEQ ID NO: 759 - RNA, 23 nt, Artificial Sequence
  Synthetic Construct
gccuuugccacaagaugacccca

SEQ ID NO: 760 - RNA, 23 nt, Artificial Sequence
  Synthetic Construct
cgccuuugccacaagaugacccc

SEQ ID NO: 761 - RNA, 23 nt, Artificial Sequence
  Synthetic Construct
ccgccuuugccacaagaugaccc

SEQ ID NO: 762 - RNA, 23 nt, Artificial Sequence
  Synthetic Construct
gccgccuuugccacaagaugacc

SEQ ID NO: 763 - RNA, 23 nt, Artificial Sequence
  Synthetic Construct
ugccgccuuugccacaagaugac

SEQ ID NO: 764 - RNA, 23 nt, Artificial Sequence
  Synthetic Construct
uugccgccuuugccacaagauga

SEQ ID NO: 765 - RNA, 23 nt, Artificial Sequence
  Synthetic Construct
guugccgccuuugccacaagaug

SEQ ID NO: 766 - RNA, 23 nt, Artificial Sequence
  Synthetic Construct
cguugccgccuuugccacaagau

SEQ ID NO: 767 - RNA, 23 nt, Artificial Sequence
  Synthetic Construct
gcguugccgccuuugccacaaga

SEQ ID NO: 768 - RNA, 23 nt, Artificial Sequence
  Synthetic Construct
ggcguugccgccuuugccacaag

SEQ ID NO: 769 - RNA, 23 nt, Artificial Sequence
  Synthetic Construct
cggcguugccgccuuugccacaa

SEQ ID NO: 770 - RNA, 23 nt, Artificial Sequence
  Synthetic Construct
ucggcguugccgccuuugccaca

SEQ ID NO: 771 - RNA, 23 nt, Artificial Sequence
  Synthetic Construct
cucggcguugccgccuuugccac

SEQ ID NO: 772 - RNA, 23 nt, Artificial Sequence
  Synthetic Construct
ccucggcguugccgccuuugcca

SEQ ID NO: 773 - RNA, 23 nt, Artificial Sequence
  Synthetic Construct
uccucggcguugccgccuuugcc

SEQ ID NO: 774 - RNA, 23 nt, Artificial Sequence
  Synthetic Construct
cuccucggcguugccgccuuugc

SEQ ID NO: 775 - RNA, 23 nt, Artificial Sequence
  Synthetic Construct
ucuccucggcguugccgccuuug

SEQ ID NO: 776 - RNA, 23 nt, Artificial Sequence
  Synthetic Construct
cucuccucggcguugccgccuuu

SEQ ID NO: 777 - RNA, 23 nt, Artificial Sequence
  Synthetic Construct
ccucuccucggcguugccgccuu

SEQ ID NO: 778 - RNA, 23 nt, Artificial Sequence
  Synthetic Construct
uccucuccucggcguugccgccu

SEQ ID NO: 779 - RNA, 23 nt, Artificial Sequence
  Synthetic Construct
cuccucuccucggcguugccgcc

SEQ ID NO: 780 - RNA, 23 nt, Artificial Sequence
  Synthetic Construct
ucuccucuccucggcguugccgc

SEQ ID NO: 781 - RNA, 23 nt, Artificial Sequence
  Synthetic Construct
cucuccucuccucggcguugccg

SEQ ID NO: 782 - RNA, 22 nt, Artificial Sequence
  Synthetic Construct
guuggccccuccucgccugguu

SEQ ID NO: 783 - RNA, 22 nt, Artificial Sequence
  Synthetic Construct
aguuggccccuccucgccuggu

SEQ ID NO: 784 - RNA, 22 nt, Artificial Sequence
  Synthetic Construct
caguuggccccuccucgccugg

SEQ ID NO: 785 - RNA, 22 nt, Artificial Sequence
  Synthetic Construct
gcaguuggccccuccucgccug

SEQ ID NO: 786 - RNA, 22 nt, Artificial Sequence
  Synthetic Construct
ugcaguuggccccuccucgccu

SEQ ID NO: 787 - RNA, 22 nt, Artificial Sequence
  Synthetic Construct
cugcaguuggccccuccucgcc

SEQ ID NO: 788 - RNA, 22 nt, Artificial Sequence
  Synthetic Construct
ccugcaguuggccccuccucgc

SEQ ID NO: 789 - RNA, 22 nt, Artificial Sequence
  Synthetic Construct
accugcaguuggccccuccucg

SEQ ID NO: 790 - RNA, 22 nt, Artificial Sequence
  Synthetic Construct
caccugcaguuggccccuccuc

SEQ ID NO: 791 - RNA, 22 nt, Artificial Sequence
  Synthetic Construct
ucaccugcaguuggccccuccu

SEQ ID NO: 792 - RNA, 22 nt, Artificial Sequence
  Synthetic Construct
cucaccugcaguuggccccucc

SEQ ID NO: 793 - RNA, 22 nt, Artificial Sequence
  Synthetic Construct
ccucaccugcaguuggccccuc

SEQ ID NO: 794 - RNA, 22 nt, Artificial Sequence
  Synthetic Construct
cccucaccugcaguuggccccu

SEQ ID NO: 795 - RNA, 22 nt, Artificial Sequence
  Synthetic Construct
ccccucaccugcaguuggcccc

SEQ ID NO: 796 - RNA, 22 nt, Artificial Sequence
  Synthetic Construct
accccucaccugcaguuggccc

SEQ ID NO: 797 - RNA, 22 nt, Artificial Sequence
  Synthetic Construct
aaccccucaccugcaguuggcc

SEQ ID NO: 798 - RNA, 22 nt, Artificial Sequence
  Synthetic Construct
aaaccccucaccugcaguuggc

SEQ ID NO: 799 - RNA, 22 nt, Artificial Sequence
  Synthetic Construct
caaaccccucaccugcaguugg

SEQ ID NO: 800 - RNA, 22 nt, Artificial Sequence
  Synthetic Construct
ucaaaccccucaccugcaguug

SEQ ID NO: 801 - RNA, 22 nt, Artificial Sequence
  Synthetic Construct
aucaaaccccucaccugcaguu

SEQ ID NO: 802 - RNA, 22 nt, Artificial Sequence
  Synthetic Construct
uaucaaaccccucaccugcagu

SEQ ID NO: 803 - RNA, 22 nt, Artificial Sequence
  Synthetic Construct
uuaucaaaccccucaccugcag

SEQ ID NO: 804 - RNA, 22 nt, Artificial Sequence
  Synthetic Construct
uuuaucaaaccccucaccugca

SEQ ID NO: 805 - RNA, 22 nt, Artificial Sequence
  Synthetic Construct
cuuuaucaaaccccucaccugc

SEQ ID NO: 806 - RNA, 22 nt, Artificial Sequence
  Synthetic Construct
acuuuaucaaaccccucaccug

SEQ ID NO: 807 - RNA, 22 nt, Artificial Sequence
  Synthetic Construct
gacuuuaucaaaccccucaccu

SEQ ID NO: 808 - RNA, 22 nt, Artificial Sequence
  Synthetic Construct
ugacuuuaucaaaccccucacc

SEQ ID NO: 809 - RNA, 22 nt, Artificial Sequence
  Synthetic Construct
cugacuuuaucaaaccccucac

SEQ ID NO: 810 - RNA, 22 nt, Artificial Sequence
  Synthetic Construct
ccugacuuuaucaaaccccuca

SEQ ID NO: 811 - RNA, 22 nt, Artificial Sequence
  Synthetic Construct
cccugacuuuaucaaaccccuc

SEQ ID NO: 812 - RNA, 22 nt, Artificial Sequence
  Synthetic Construct
ucccugacuuuaucaaaccccu

SEQ ID NO: 813 - RNA, 22 nt, Artificial Sequence
  Synthetic Construct
uucccugacuuuaucaaacccc

SEQ ID NO: 814 - RNA, 22 nt, Artificial Sequence
  Synthetic Construct
cuucccugacuuuaucaaaccc

SEQ ID NO: 815 - RNA, 22 nt, Artificial Sequence
  Synthetic Construct
gcuucccugacuuuaucaaacc

SEQ ID NO: 816 - RNA, 22 nt, Artificial Sequence
  Synthetic Construct
ugcuucccugacuuuaucaaac

SEQ ID NO: 817 - RNA, 22 nt, Artificial Sequence
  Synthetic Construct
cugcuucccugacuuuaucaaa

SEQ ID NO: 818 - RNA, 22 nt, Artificial Sequence
  Synthetic Construct
ucugcuucccugacuuuaucaa

SEQ ID NO: 819 - RNA, 22 nt, Artificial Sequence
  Synthetic Construct
uucugcuucccugacuuuauca

SEQ ID NO: 820 - RNA, 22 nt, Artificial Sequence
  Synthetic Construct
cuucugcuucccugacuuuauc

SEQ ID NO: 821 - RNA, 22 nt, Artificial Sequence
  Synthetic Construct
ucuucugcuucccugacuuuau

SEQ ID NO: 822 - RNA, 22 nt, Artificial Sequence
  Synthetic Construct
aucuucugcuucccugacuuua

SEQ ID NO: 823 - RNA, 22 nt, Artificial Sequence
  Synthetic Construct
uaucuucugcuucccugacuuu

SEQ ID NO: 824 - RNA, 22 nt, Artificial Sequence
  Synthetic Construct
cuaucuucugcuucccugacuu

SEQ ID NO: 825 - RNA, 22 nt, Artificial Sequence
  Synthetic Construct
gcuaucuucugcuucccugacu

SEQ ID NO: 826 - RNA, 22 nt, Artificial Sequence
  Synthetic Construct
ggcuaucuucugcuucccugac

SEQ ID NO: 827 - RNA, 22 nt, Artificial Sequence
  Synthetic Construct
gggcuaucuucugcuucccuga

SEQ ID NO: 828 - RNA, 22 nt, Artificial Sequence
  Synthetic Construct
ggggcuaucuucugcuucccug

SEQ ID NO: 829 - RNA, 22 nt, Artificial Sequence
  Synthetic Construct
gggggcuaucuucugcuucccu

SEQ ID NO: 830 - RNA, 22 nt, Artificial Sequence
  Synthetic Construct
ugggggcuaucuucugcuuccc

SEQ ID NO: 831 - RNA, 22 nt, Artificial Sequence
  Synthetic Construct
uugggggcuaucuucugcuucc

SEQ ID NO: 832 - RNA, 22 nt, Artificial Sequence
  Synthetic Construct
guugggggcuaucuucugcuuc

SEQ ID NO: 833 - RNA, 22 nt, Artificial Sequence
  Synthetic Construct
uguugggggcuaucuucugcuu

SEQ ID NO: 834 - RNA, 22 nt, Artificial Sequence
  Synthetic Construct
guguugggggcuaucuucugcu

SEQ ID NO: 835 - RNA, 22 nt, Artificial Sequence
  Synthetic Construct
uguguugggggcuaucuucugc

SEQ ID NO: 836 - RNA, 22 nt, Artificial Sequence
  Synthetic Construct
auguguugggggcuaucuucug

SEQ ID NO: 837 - RNA, 22 nt, Artificial Sequence
  Synthetic Construct
cauguguugggggcuaucuucu

SEQ ID NO: 838 - RNA, 22 nt, Artificial Sequence
  Synthetic Construct
acauguguugggggcuaucuuc

SEQ ID NO: 839 - RNA, 22 nt, Artificial Sequence
  Synthetic Construct
cacauguguugggggcuaucuu

SEQ ID NO: 840 - RNA, 22 nt, Artificial Sequence
  Synthetic Construct
ucacauguguugggggcuaucu

SEQ ID NO: 841 - RNA, 22 nt, Artificial Sequence
  Synthetic Construct
gucacauguguugggggcuauc

SEQ ID NO: 842 - RNA, 22 nt, Artificial Sequence
  Synthetic Construct
agucacauguguugggggcuau

SEQ ID NO: 843 - RNA, 22 nt, Artificial Sequence
  Synthetic Construct
cagucacauguguugggggcua

SEQ ID NO: 844 - RNA, 22 nt, Artificial Sequence
  Synthetic Construct
ccagucacauguguugggggcu

SEQ ID NO: 845 - RNA, 22 nt, Artificial Sequence
  Synthetic Construct
cccagucacauguguugggggc

SEQ ID NO: 846 - RNA, 22 nt, Artificial Sequence
  Synthetic Construct
ccccagucacauguguuggggg

SEQ ID NO: 847 - RNA, 22 nt, Artificial Sequence
  Synthetic Construct
cccccagucacauguguugggg

SEQ ID NO: 848 - RNA, 22 nt, Artificial Sequence
  Synthetic Construct
ccccccagucacauguguuggg

SEQ ID NO: 849 - RNA, 22 nt, Artificial Sequence
  Synthetic Construct
uccccccagucacauguguugg

SEQ ID NO: 850 - RNA, 22 nt, Artificial Sequence
  Synthetic Construct
auccccccagucacauguguug

SEQ ID NO: 851 - RNA, 22 nt, Artificial Sequence
  Synthetic Construct
cauccccccagucacauguguu

SEQ ID NO: 852 - RNA, 22 nt, Artificial Sequence
  Synthetic Construct
ccauccccccagucacaugugu

SEQ ID NO: 853 - RNA, 22 nt, Artificial Sequence
  Synthetic Construct
accauccccccagucacaugug

SEQ ID NO: 854 - RNA, 22 nt, Artificial Sequence
  Synthetic Construct
gaccauccccccagucacaugu

SEQ ID NO: 855 - RNA, 22 nt, Artificial Sequence
  Synthetic Construct
ugaccauccccccagucacaug

SEQ ID NO: 856 - RNA, 22 nt, Artificial Sequence
  Synthetic Construct
uugaccauccccccagucacau

SEQ ID NO: 857 - RNA, 22 nt, Artificial Sequence
  Synthetic Construct
guugaccauccccccagucaca

SEQ ID NO: 858 - RNA, 22 nt, Artificial Sequence
  Synthetic Construct
uguugaccauccccccagucac

SEQ ID NO: 859 - RNA, 22 nt, Artificial Sequence
  Synthetic Construct
uuguugaccauccccccaguca

SEQ ID NO: 860 - RNA, 22 nt, Artificial Sequence
  Synthetic Construct
cuuguugaccauccccccaguc

SEQ ID NO: 861 - RNA, 22 nt, Artificial Sequence
  Synthetic Construct
ucuuguugaccauccccccagu

SEQ ID NO: 862 - RNA, 22 nt, Artificial Sequence
  Synthetic Construct
uucuuguugaccauccccccag

SEQ ID NO: 863 - RNA, 22 nt, Artificial Sequence
  Synthetic Construct
uuucuuguugaccaucccccca

SEQ ID NO: 864 - RNA, 22 nt, Artificial Sequence
  Synthetic Construct
cuuucuuguugaccaucccccc

SEQ ID NO: 865 - RNA, 22 nt, Artificial Sequence
  Synthetic Construct
ccuuucuuguugaccauccccc

SEQ ID NO: 866 - RNA, 22 nt, Artificial Sequence
  Synthetic Construct
uccuuucuuguugaccaucccc

SEQ ID NO: 867 - RNA, 22 nt, Artificial Sequence
  Synthetic Construct
uuccuuucuuguugaccauccc

SEQ ID NO: 868 - RNA, 22 nt, Artificial Sequence
  Synthetic Construct
auuccuuucuuguugaccaucc

SEQ ID NO: 869 - RNA, 22 nt, Artificial Sequence
  Synthetic Construct
cauuccuuucuuguugaccauc

SEQ ID NO: 870 - RNA, 22 nt, Artificial Sequence
  Synthetic Construct
ccauuccuuucuuguugaccau

SEQ ID NO: 871 - RNA, 22 nt, Artificial Sequence
  Synthetic Construct
accauuccuuucuuguugacca

SEQ ID NO: 872 - RNA, 22 nt, Artificial Sequence
  Synthetic Construct
caccauuccuuucuuguugacc

SEQ ID NO: 873 - RNA, 22 nt, Artificial Sequence
  Synthetic Construct
ucaccauuccuuucuuguugac

SEQ ID NO: 874 - RNA, 22 nt, Artificial Sequence
  Synthetic Construct
cucaccauuccuuucuuguuga

SEQ ID NO: 875 - RNA, 22 nt, Artificial Sequence
  Synthetic Construct
acucaccauuccuuucuuguug

SEQ ID NO: 876 - RNA, 22 nt, Artificial Sequence
  Synthetic Construct
cacucaccauuccuuucuuguu

SEQ ID NO: 877 - RNA, 22 nt, Artificial Sequence
  Synthetic Construct
ccacucaccauuccuuucuugu

SEQ ID NO: 878 - RNA, 22 nt, Artificial Sequence
  Synthetic Construct
accacucaccauuccuuucuug

SEQ ID NO: 879 - RNA, 22 nt, Artificial Sequence
  Synthetic Construct
caccacucaccauuccuuucuu

SEQ ID NO: 880 - RNA, 22 nt, Artificial Sequence
  Synthetic Construct
ccaccacucaccauuccuuucu

SEQ ID NO: 881 - RNA, 22 nt, Artificial Sequence
  Synthetic Construct
accaccacucaccauuccuuuc

SEQ ID NO: 882 - RNA, 22 nt, Artificial Sequence
  Synthetic Construct
caccaccacucaccauuccuuu

SEQ ID NO: 883 - RNA, 22 nt, Artificial Sequence
  Synthetic Construct
ccaccaccacucaccauuccuu

SEQ ID NO: 884 - RNA, 22 nt, Artificial Sequence
  Synthetic Construct
gccaccaccacucaccauuccu

SEQ ID NO: 885 - RNA, 22 nt, Artificial Sequence
  Synthetic Construct
agccaccaccacucaccauucc

SEQ ID NO: 886 - RNA, 22 nt, Artificial Sequence
  Synthetic Construct
cagccaccaccacucaccauuc

SEQ ID NO: 887 - RNA, 22 nt, Artificial Sequence
  Synthetic Construct
acagccaccaccacucaccauu

SEQ ID NO: 888 - RNA, 22 nt, Artificial Sequence
  Synthetic Construct
cacagccaccaccacucaccau

SEQ ID NO: 889 - RNA, 22 nt, Artificial Sequence
  Synthetic Construct
gcacagccaccaccacucacca

SEQ ID NO: 890 - RNA, 22 nt, Artificial Sequence
  Synthetic Construct
agcacagccaccaccacucacc

SEQ ID NO: 891 - RNA, 22 nt, Artificial Sequence
  Synthetic Construct
gagcacagccaccaccacucac

SEQ ID NO: 892 - RNA, 22 nt, Artificial Sequence
  Synthetic Construct
agagcacagccaccaccacuca

SEQ ID NO: 893 - RNA, 22 nt, Artificial Sequence
  Synthetic Construct
gagagcacagccaccaccacuc

SEQ ID NO: 894 - RNA, 22 nt, Artificial Sequence
  Synthetic Construct
ugagagcacagccaccaccacu

SEQ ID NO: 895 - RNA, 22 nt, Artificial Sequence
  Synthetic Construct
uugagagcacagccaccaccac

SEQ ID NO: 896 - RNA, 22 nt, Artificial Sequence
  Synthetic Construct
auugagagcacagccaccacca

SEQ ID NO: 897 - RNA, 22 nt, Artificial Sequence
  Synthetic Construct
aauugagagcacagccaccacc

SEQ ID NO: 898 - RNA, 22 nt, Artificial Sequence
  Synthetic Construct
aaauugagagcacagccaccac

SEQ ID NO: 899 - RNA, 22 nt, Artificial Sequence
  Synthetic Construct
aaaauugagagcacagccacca

SEQ ID NO: 900 - RNA, 22 nt, Artificial Sequence
  Synthetic Construct
gaaaauugagagcacagccacc

SEQ ID NO: 901 - RNA, 22 nt, Artificial Sequence
  Synthetic Construct
ggaaaauugagagcacagccac

SEQ ID NO: 902 - RNA, 22 nt, Artificial Sequence
  Synthetic Construct
gggaaaauugagagcacagcca

SEQ ID NO: 903 - RNA, 22 nt, Artificial Sequence
  Synthetic Construct
agggaaaauugagagcacagcc

SEQ ID NO: 904 - RNA, 22 nt, Artificial Sequence
  Synthetic Construct
cagggaaaauugagagcacagc

SEQ ID NO: 905 - RNA, 22 nt, Artificial Sequence
  Synthetic Construct
acagggaaaauugagagcacag

SEQ ID NO: 906 - RNA, 22 nt, Artificial Sequence
  Synthetic Construct
gacagggaaaauugagagcaca

SEQ ID NO: 907 - RNA, 22 nt, Artificial Sequence
  Synthetic Construct
agacagggaaaauugagagcac

SEQ ID NO: 908 - RNA, 22 nt, Artificial Sequence
  Synthetic Construct
gagacagggaaaauugagagca

SEQ ID NO: 909 - RNA, 22 nt, Artificial Sequence
  Synthetic Construct
ggagacagggaaaauugagagc

SEQ ID NO: 910 - RNA, 22 nt, Artificial Sequence
  Synthetic Construct
cggagacagggaaaauugagag

SEQ ID NO: 911 - RNA, 22 nt, Artificial Sequence
  Synthetic Construct
acggagacagggaaaauugaga

SEQ ID NO: 912 - RNA, 22 nt, Artificial Sequence
  Synthetic Construct
uacggagacagggaaaauugag

SEQ ID NO: 913 - RNA, 22 nt, Artificial Sequence
  Synthetic Construct
guacggagacagggaaaauuga

SEQ ID NO: 914 - RNA, 22 nt, Artificial Sequence
  Synthetic Construct
uguacggagacagggaaaauug

SEQ ID NO: 915 - RNA, 22 nt, Artificial Sequence
  Synthetic Construct
cuguacggagacagggaaaauu

SEQ ID NO: 916 - RNA, 22 nt, Artificial Sequence
  Synthetic Construct
ccuguacggagacagggaaaau

SEQ ID NO: 917 - RNA, 22 nt, Artificial Sequence
  Synthetic Construct
gccuguacggagacagggaaaa

SEQ ID NO: 918 - RNA, 22 nt, Artificial Sequence
  Synthetic Construct
agccuguacggagacagggaaa

SEQ ID NO: 919 - RNA, 22 nt, Artificial Sequence
  Synthetic Construct
gagccuguacggagacagggaa

SEQ ID NO: 920 - RNA, 22 nt, Artificial Sequence
  Synthetic Construct
agagccuguacggagacaggga

SEQ ID NO: 921 - RNA, 22 nt, Artificial Sequence
  Synthetic Construct
cagagccuguacggagacaggg

SEQ ID NO: 922 - RNA, 22 nt, Artificial Sequence
  Synthetic Construct
acagagccuguacggagacagg

SEQ ID NO: 923 - RNA, 22 nt, Artificial Sequence
  Synthetic Construct
cacagagccuguacggagacag

SEQ ID NO: 924 - RNA, 22 nt, Artificial Sequence
  Synthetic Construct
ccacagagccuguacggagaca

SEQ ID NO: 925 - RNA, 22 nt, Artificial Sequence
  Synthetic Construct
cccacagagccuguacggagac

SEQ ID NO: 926 - RNA, 22 nt, Artificial Sequence
  Synthetic Construct
ucccacagagccuguacggaga

SEQ ID NO: 927 - RNA, 22 nt, Artificial Sequence
  Synthetic Construct
cucccacagagccuguacggag

SEQ ID NO: 928 - RNA, 22 nt, Artificial Sequence
  Synthetic Construct
ccucccacagagccuguacgga

SEQ ID NO: 929 - RNA, 22 nt, Artificial Sequence
  Synthetic Construct
uccucccacagagccuguacgg

SEQ ID NO: 930 - RNA, 22 nt, Artificial Sequence
  Synthetic Construct
auccucccacagagccuguacg

SEQ ID NO: 931 - RNA, 22 nt, Artificial Sequence
  Synthetic Construct
gauccucccacagagccuguac

SEQ ID NO: 932 - RNA, 22 nt, Artificial Sequence
  Synthetic Construct
ugauccucccacagagccugua

SEQ ID NO: 933 - RNA, 22 nt, Artificial Sequence
  Synthetic Construct
cugauccucccacagagccugu

SEQ ID NO: 934 - RNA, 22 nt, Artificial Sequence
  Synthetic Construct
ccugauccucccacagagccug

SEQ ID NO: 935 - RNA, 22 nt, Artificial Sequence
  Synthetic Construct
cccugauccucccacagagccu

SEQ ID NO: 936 - RNA, 22 nt, Artificial Sequence
  Synthetic Construct
gcccugauccucccacagagcc

SEQ ID NO: 937 - RNA, 22 nt, Artificial Sequence
  Synthetic Construct
agcccugauccucccacagagc

SEQ ID NO: 938 - RNA, 22 nt, Artificial Sequence
  Synthetic Construct
cagcccugauccucccacagag

SEQ ID NO: 939 - RNA, 22 nt, Artificial Sequence
  Synthetic Construct
ccagcccugauccucccacaga

SEQ ID NO: 940 - RNA, 22 nt, Artificial Sequence
  Synthetic Construct
cccagcccugauccucccacag

SEQ ID NO: 941 - RNA, 22 nt, Artificial Sequence
  Synthetic Construct
ucccagcccugauccucccaca

SEQ ID NO: 942 - RNA, 22 nt, Artificial Sequence
  Synthetic Construct
uucccagcccugauccucccac

SEQ ID NO: 943 - RNA, 22 nt, Artificial Sequence
  Synthetic Construct
guucccagcccugauccuccca

SEQ ID NO: 944 - RNA, 22 nt, Artificial Sequence
  Synthetic Construct
aguucccagcccugauccuccc

SEQ ID NO: 945 - RNA, 22 nt, Artificial Sequence
  Synthetic Construct
gaguucccagcccugauccucc

SEQ ID NO: 946 - RNA, 22 nt, Artificial Sequence
  Synthetic Construct
agaguucccagcccugauccuc

SEQ ID NO: 947 - RNA, 22 nt, Artificial Sequence
  Synthetic Construct
uagaguucccagcccugauccu

SEQ ID NO: 948 - RNA, 22 nt, Artificial Sequence
  Synthetic Construct
cuagaguucccagcccugaucc

SEQ ID NO: 949 - RNA, 22 nt, Artificial Sequence
  Synthetic Construct
gcuagaguucccagcccugauc

SEQ ID NO: 950 - RNA, 22 nt, Artificial Sequence
  Synthetic Construct
ggcuagaguucccagcccugau

SEQ ID NO: 951 - RNA, 22 nt, Artificial Sequence
  Synthetic Construct
gggcuagaguucccagcccuga

SEQ ID NO: 952 - RNA, 22 nt, Artificial Sequence
  Synthetic Construct
agggcuagaguucccagcccug

SEQ ID NO: 953 - RNA, 22 nt, Artificial Sequence
  Synthetic Construct
cagggcuagaguucccagcccu

SEQ ID NO: 954 - RNA, 22 nt, Artificial Sequence
  Synthetic Construct
ccagggcuagaguucccagccc

SEQ ID NO: 955 - RNA, 22 nt, Artificial Sequence
  Synthetic Construct
gccagggcuagaguucccagcc

SEQ ID NO: 956 - RNA, 22 nt, Artificial Sequence
  Synthetic Construct
ggccagggcuagaguucccagc

SEQ ID NO: 957 - RNA, 22 nt, Artificial Sequence
  Synthetic Construct
gggccagggcuagaguucccag

SEQ ID NO: 958 - RNA, 22 nt, Artificial Sequence
  Synthetic Construct
agggccagggcuagaguuccca

SEQ ID NO: 959 - RNA, 22 nt, Artificial Sequence
  Synthetic Construct
cagggccagggcuagaguuccc

SEQ ID NO: 960 - RNA, 22 nt, Artificial Sequence
  Synthetic Construct
ccagggccagggcuagaguucc

SEQ ID NO: 961 - RNA, 22 nt, Artificial Sequence
  Synthetic Construct
cccagggccagggcuagaguuc

SEQ ID NO: 962 - RNA, 22 nt, Artificial Sequence
  Synthetic Construct
ccccagggccagggcuagaguu

SEQ ID NO: 963 - RNA, 22 nt, Artificial Sequence
  Synthetic Construct
uccccagggccagggcuagagu

SEQ ID NO: 964 - RNA, 22 nt, Artificial Sequence
  Synthetic Construct
auccccagggccagggcuagag

SEQ ID NO: 965 - RNA, 22 nt, Artificial Sequence
  Synthetic Construct
gauccccagggccagggcuaga

SEQ ID NO: 966 - RNA, 22 nt, Artificial Sequence
  Synthetic Construct
ggauccccagggccagggcuag

SEQ ID NO: 967 - RNA, 22 nt, Artificial Sequence
  Synthetic Construct
aggauccccagggccagggcua

SEQ ID NO: 968 - RNA, 22 nt, Artificial Sequence
  Synthetic Construct
caggauccccagggccagggcu

SEQ ID NO: 969 - RNA, 22 nt, Artificial Sequence
  Synthetic Construct
ccaggauccccagggccagggc

SEQ ID NO: 970 - RNA, 22 nt, Artificial Sequence
  Synthetic Construct
cccaggauccccagggccaggg

SEQ ID NO: 971 - RNA, 22 nt, Artificial Sequence
  Synthetic Construct
ucccaggauccccagggccagg

SEQ ID NO: 972 - RNA, 22 nt, Artificial Sequence
  Synthetic Construct
cucccaggauccccagggccag

SEQ ID NO: 973 - RNA, 22 nt, Artificial Sequence
  Synthetic Construct
ccucccaggauccccagggcca

SEQ ID NO: 974 - RNA, 22 nt, Artificial Sequence
  Synthetic Construct
gccucccaggauccccagggcc

SEQ ID NO: 975 - RNA, 22 nt, Artificial Sequence
  Synthetic Construct
ggccucccaggauccccagggc

SEQ ID NO: 976 - RNA, 22 nt, Artificial Sequence
  Synthetic Construct
aggccucccaggauccccaggg

SEQ ID NO: 977 - RNA, 22 nt, Artificial Sequence
  Synthetic Construct
caggccucccaggauccccagg

SEQ ID NO: 978 - RNA, 22 nt, Artificial Sequence
  Synthetic Construct
ccaggccucccaggauccccag

SEQ ID NO: 979 - RNA, 22 nt, Artificial Sequence
  Synthetic Construct
cccaggccucccaggaucccca

SEQ ID NO: 980 - RNA, 22 nt, Artificial Sequence
  Synthetic Construct
ccccaggccucccaggaucccc

SEQ ID NO: 981 - RNA, 22 nt, Artificial Sequence
  Synthetic Construct
uccccaggccucccaggauccc

SEQ ID NO: 982 - RNA, 22 nt, Artificial Sequence
  Synthetic Construct
guccccaggccucccaggaucc

SEQ ID NO: 983 - RNA, 22 nt, Artificial Sequence
  Synthetic Construct
uguccccaggccucccaggauc

SEQ ID NO: 984 - RNA, 22 nt, Artificial Sequence
  Synthetic Construct
cuguccccaggccucccaggau

SEQ ID NO: 985 - RNA, 22 nt, Artificial Sequence
  Synthetic Construct
gcuguccccaggccucccagga

SEQ ID NO: 986 - RNA, 22 nt, Artificial Sequence
  Synthetic Construct
ggcuguccccaggccucccagg

SEQ ID NO: 987 - RNA, 22 nt, Artificial Sequence
  Synthetic Construct
cggcuguccccaggccucccag

SEQ ID NO: 988 - RNA, 22 nt, Artificial Sequence
  Synthetic Construct
gcggcuguccccaggccuccca

SEQ ID NO: 989 - RNA, 22 nt, Artificial Sequence
  Synthetic Construct
ggcggcuguccccaggccuccc

SEQ ID NO: 990 - RNA, 22 nt, Artificial Sequence
  Synthetic Construct
gggcggcuguccccaggccucc

SEQ ID NO: 991 - RNA, 22 nt, Artificial Sequence
  Synthetic Construct
agggcggcuguccccaggccuc

SEQ ID NO: 992 - RNA, 22 nt, Artificial Sequence
  Synthetic Construct
cagggcggcuguccccaggccu

SEQ ID NO: 993 - RNA, 22 nt, Artificial Sequence
  Synthetic Construct
gcagggcggcuguccccaggcc

SEQ ID NO: 994 - RNA, 22 nt, Artificial Sequence
  Synthetic Construct
agcagggcggcuguccccaggc

SEQ ID NO: 995 - RNA, 22 nt, Artificial Sequence
  Synthetic Construct
gagcagggcggcuguccccagg

SEQ ID NO: 996 - RNA, 22 nt, Artificial Sequence
  Synthetic Construct
ugagcagggcggcuguccccag

SEQ ID NO: 997 - RNA, 22 nt, Artificial Sequence
  Synthetic Construct
augagcagggcggcugucccca

SEQ ID NO: 998 - RNA, 22 nt, Artificial Sequence
  Synthetic Construct
aaugagcagggcggcugucccc

SEQ ID NO: 999 - RNA, 22 nt, Artificial Sequence
  Synthetic Construct
caaugagcagggcggcuguccc

SEQ ID NO: 1000 - RNA, 22 nt, Artificial Sequence
  Synthetic Construct
ccaaugagcagggcggcugucc

SEQ ID NO: 1001 - RNA, 22 nt, Artificial Sequence
  Synthetic Construct
cccaaugagcagggcggcuguc

SEQ ID NO: 1002 - RNA, 22 nt, Artificial Sequence
  Synthetic Construct
ccccaaugagcagggcggcugu

SEQ ID NO: 1003 - RNA, 22 nt, Artificial Sequence
  Synthetic Construct
accccaaugagcagggcggcug

SEQ ID NO: 1004 - RNA, 22 nt, Artificial Sequence
  Synthetic Construct
gaccccaaugagcagggcggcu

SEQ ID NO: 1005 - RNA, 22 nt, Artificial Sequence
  Synthetic Construct
ugaccccaaugagcagggcggc

SEQ ID NO: 1006 - RNA, 22 nt, Artificial Sequence
  Synthetic Construct
augaccccaaugagcagggcgg

SEQ ID NO: 1007 - RNA, 22 nt, Artificial Sequence
  Synthetic Construct
gaugaccccaaugagcagggcg

SEQ ID NO: 1008 - RNA, 22 nt, Artificial Sequence
  Synthetic Construct
agaugaccccaaugagcagggc

SEQ ID NO: 1009 - RNA, 22 nt, Artificial Sequence
  Synthetic Construct
aagaugaccccaaugagcaggg

SEQ ID NO: 1010 - RNA, 22 nt, Artificial Sequence
  Synthetic Construct
caagaugaccccaaugagcagg

SEQ ID NO: 1011 - RNA, 22 nt, Artificial Sequence
  Synthetic Construct
acaagaugaccccaaugagcag

SEQ ID NO: 1012 - RNA, 22 nt, Artificial Sequence
  Synthetic Construct
cacaagaugaccccaaugagca

SEQ ID NO: 1013 - RNA, 22 nt, Artificial Sequence
  Synthetic Construct
ccacaagaugaccccaaugagc

SEQ ID NO: 1014 - RNA, 22 nt, Artificial Sequence
  Synthetic Construct
gccacaagaugaccccaaugag

SEQ ID NO: 1015 - RNA, 22 nt, Artificial Sequence
  Synthetic Construct
ugccacaagaugaccccaauga

SEQ ID NO: 1016 - RNA, 22 nt, Artificial Sequence
  Synthetic Construct
uugccacaagaugaccccaaug

SEQ ID NO: 1017 - RNA, 22 nt, Artificial Sequence
  Synthetic Construct
uuugccacaagaugaccccaau

SEQ ID NO: 1018 - RNA, 22 nt, Artificial Sequence
  Synthetic Construct
cuuugccacaagaugaccccaa

SEQ ID NO: 1019 - RNA, 22 nt, Artificial Sequence
  Synthetic Construct
ccuuugccacaagaugacccca

SEQ ID NO: 1020 - RNA, 22 nt, Artificial Sequence
  Synthetic Construct
gccuuugccacaagaugacccc

SEQ ID NO: 1021 - RNA, 22 nt, Artificial Sequence
  Synthetic Construct
cgccuuugccacaagaugaccc

SEQ ID NO: 1022 - RNA, 22 nt, Artificial Sequence
  Synthetic Construct
ccgccuuugccacaagaugacc

SEQ ID NO: 1023 - RNA, 22 nt, Artificial Sequence
  Synthetic Construct
gccgccuuugccacaagaugac

SEQ ID NO: 1024 - RNA, 22 nt, Artificial Sequence
  Synthetic Construct
ugccgccuuugccacaagauga

SEQ ID NO: 1025 - RNA, 22 nt, Artificial Sequence
  Synthetic Construct
uugccgccuuugccacaagaug

SEQ ID NO: 1026 - RNA, 22 nt, Artificial Sequence
  Synthetic Construct
guugccgccuuugccacaagau

SEQ ID NO: 1027 - RNA, 22 nt, Artificial Sequence
  Synthetic Construct
cguugccgccuuugccacaaga

SEQ ID NO: 1028 - RNA, 22 nt, Artificial Sequence
  Synthetic Construct
gcguugccgccuuugccacaag

SEQ ID NO: 1029 - RNA, 22 nt, Artificial Sequence
  Synthetic Construct
ggcguugccgccuuugccacaa

SEQ ID NO: 1030 - RNA, 22 nt, Artificial Sequence
  Synthetic Construct
cggcguugccgccuuugccaca

SEQ ID NO: 1031 - RNA, 22 nt, Artificial Sequence
  Synthetic Construct
ucggcguugccgccuuugccac

SEQ ID NO: 1032 - RNA, 22 nt, Artificial Sequence
  Synthetic Construct
cucggcguugccgccuuugcca

SEQ ID NO: 1033 - RNA, 22 nt, Artificial Sequence
  Synthetic Construct
ccucggcguugccgccuuugcc

SEQ ID NO: 1034 - RNA, 22 nt, Artificial Sequence
  Synthetic Construct
uccucggcguugccgccuuugc

SEQ ID NO: 1035 - RNA, 22 nt, Artificial Sequence
  Synthetic Construct
cuccucggcguugccgccuuug

SEQ ID NO: 1036 - RNA, 22 nt, Artificial Sequence
  Synthetic Construct
ucuccucggcguugccgccuuu

SEQ ID NO: 1037 - RNA, 22 nt, Artificial Sequence
  Synthetic Construct
cucuccucggcguugccgccuu

SEQ ID NO: 1038 - RNA, 22 nt, Artificial Sequence
  Synthetic Construct
ccucuccucggcguugccgccu

SEQ ID NO: 1039 - RNA, 22 nt, Artificial Sequence
  Synthetic Construct
uccucuccucggcguugccgcc

SEQ ID NO: 1040 - RNA, 22 nt, Artificial Sequence
  Synthetic Construct
cuccucuccucggcguugccgc

SEQ ID NO: 1041 - RNA, 22 nt, Artificial Sequence
  Synthetic Construct
ucuccucuccucggcguugccg

SEQ ID NO: 1042 - RNA, 22 nt, Artificial Sequence
  Synthetic Construct
cucuccucuccucggcguugcc

SEQ ID NO: 1043 - RNA, 21 nt, Artificial Sequence
  Synthetic Construct
uuggccccuccucgccugguu

SEQ ID NO: 1044 - RNA, 21 nt, Artificial Sequence
  Synthetic Construct
guuggccccuccucgccuggu

SEQ ID NO: 1045 - RNA, 21 nt, Artificial Sequence
  Synthetic Construct
aguuggccccuccucgccugg

SEQ ID NO: 1046 - RNA, 21 nt, Artificial Sequence
  Synthetic Construct
caguuggccccuccucgccug

SEQ ID NO: 1047 - RNA, 21 nt, Artificial Sequence
  Synthetic Construct
gcaguuggccccuccucgccu

SEQ ID NO: 1048 - RNA, 21 nt, Artificial Sequence
  Synthetic Construct
ugcaguuggccccuccucgcc

SEQ ID NO: 1049 - RNA, 21 nt, Artificial Sequence
  Synthetic Construct
cugcaguuggccccuccucgc

SEQ ID NO: 1050 - RNA, 21 nt, Artificial Sequence
  Synthetic Construct
ccugcaguuggccccuccucg

SEQ ID NO: 1051 - RNA, 21 nt, Artificial Sequence
  Synthetic Construct
accugcaguuggccccuccuc

SEQ ID NO: 1052 - RNA, 21 nt, Artificial Sequence
  Synthetic Construct
caccugcaguuggccccuccu

SEQ ID NO: 1053 - RNA, 21 nt, Artificial Sequence
  Synthetic Construct
ucaccugcaguuggccccucc

SEQ ID NO: 1054 - RNA, 21 nt, Artificial Sequence
  Synthetic Construct
cucaccugcaguuggccccuc

SEQ ID NO: 1055 - RNA, 21 nt, Artificial Sequence
  Synthetic Construct
ccucaccugcaguuggccccu

SEQ ID NO: 1056 - RNA, 21 nt, Artificial Sequence
  Synthetic Construct
cccucaccugcaguuggcccc

SEQ ID NO: 1057 - RNA, 21 nt, Artificial Sequence
  Synthetic Construct
ccccucaccugcaguuggccc

SEQ ID NO: 1058 - RNA, 21 nt, Artificial Sequence
  Synthetic Construct
accccucaccugcaguuggcc

SEQ ID NO: 1059 - RNA, 21 nt, Artificial Sequence
  Synthetic Construct
aaccccucaccugcaguuggc

SEQ ID NO: 1060 - RNA, 21 nt, Artificial Sequence
  Synthetic Construct
aaaccccucaccugcaguugg

SEQ ID NO: 1061 - RNA, 21 nt, Artificial Sequence
  Synthetic Construct
caaaccccucaccugcaguug

SEQ ID NO: 1062 - RNA, 21 nt, Artificial Sequence
  Synthetic Construct
ucaaaccccucaccugcaguu

SEQ ID NO: 1063 - RNA, 21 nt, Artificial Sequence
  Synthetic Construct
aucaaaccccucaccugcagu

SEQ ID NO: 1064 - RNA, 21 nt, Artificial Sequence
  Synthetic Construct
uaucaaaccccucaccugcag

SEQ ID NO: 1065 - RNA, 21 nt, Artificial Sequence
  Synthetic Construct
uuaucaaaccccucaccugca

SEQ ID NO: 1066 - RNA, 21 nt, Artificial Sequence
  Synthetic Construct
uuuaucaaaccccucaccugc

SEQ ID NO: 1067 - RNA, 21 nt, Artificial Sequence
  Synthetic Construct
cuuuaucaaaccccucaccug

SEQ ID NO: 1068 - RNA, 21 nt, Artificial Sequence
  Synthetic Construct
acuuuaucaaaccccucaccu

SEQ ID NO: 1069 - RNA, 21 nt, Artificial Sequence
  Synthetic Construct
gacuuuaucaaaccccucacc

SEQ ID NO: 1070 - RNA, 21 nt, Artificial Sequence
  Synthetic Construct
ugacuuuaucaaaccccucac

SEQ ID NO: 1071 - RNA, 21 nt, Artificial Sequence
  Synthetic Construct
cugacuuuaucaaaccccuca

SEQ ID NO: 1072 - RNA, 21 nt, Artificial Sequence
  Synthetic Construct
ccugacuuuaucaaaccccuc

SEQ ID NO: 1073 - RNA, 21 nt, Artificial Sequence
  Synthetic Construct
cccugacuuuaucaaaccccu

SEQ ID NO: 1074 - RNA, 21 nt, Artificial Sequence
  Synthetic Construct
ucccugacuuuaucaaacccc

SEQ ID NO: 1075 - RNA, 21 nt, Artificial Sequence
  Synthetic Construct
uucccugacuuuaucaaaccc

SEQ ID NO: 1076 - RNA, 21 nt, Artificial Sequence
  Synthetic Construct
cuucccugacuuuaucaaacc

SEQ ID NO: 1077 - RNA, 21 nt, Artificial Sequence
  Synthetic Construct
gcuucccugacuuuaucaaac

SEQ ID NO: 1078 - RNA, 21 nt, Artificial Sequence
  Synthetic Construct
ugcuucccugacuuuaucaaa

SEQ ID NO: 1079 - RNA, 21 nt, Artificial Sequence
  Synthetic Construct
cugcuucccugacuuuaucaa

SEQ ID NO: 1080 - RNA, 21 nt, Artificial Sequence
  Synthetic Construct
ucugcuucccugacuuuauca

SEQ ID NO: 1081 - RNA, 21 nt, Artificial Sequence
  Synthetic Construct
uucugcuucccugacuuuauc

SEQ ID NO: 1082 - RNA, 21 nt, Artificial Sequence
  Synthetic Construct
cuucugcuucccugacuuuau

SEQ ID NO: 1083 - RNA, 21 nt, Artificial Sequence
  Synthetic Construct
ucuucugcuucccugacuuua

SEQ ID NO: 1084 - RNA, 21 nt, Artificial Sequence
  Synthetic Construct
aucuucugcuucccugacuuu

SEQ ID NO: 1085 - RNA, 21 nt, Artificial Sequence
  Synthetic Construct
uaucuucugcuucccugacuu

SEQ ID NO: 1086 - RNA, 21 nt, Artificial Sequence
  Synthetic Construct
cuaucuucugcuucccugacu

SEQ ID NO: 1087 - RNA, 21 nt, Artificial Sequence
  Synthetic Construct
gcuaucuucugcuucccugac

SEQ ID NO: 1088 - RNA, 21 nt, Artificial Sequence
  Synthetic Construct
ggcuaucuucugcuucccuga

SEQ ID NO: 1089 - RNA, 21 nt, Artificial Sequence
  Synthetic Construct
gggcuaucuucugcuucccug

SEQ ID NO: 1090 - RNA, 21 nt, Artificial Sequence
  Synthetic Construct
ggggcuaucuucugcuucccu

SEQ ID NO: 1091 - RNA, 21 nt, Artificial Sequence
  Synthetic Construct
gggggcuaucuucugcuuccc

SEQ ID NO: 1092 - RNA, 21 nt, Artificial Sequence
  Synthetic Construct
ugggggcuaucuucugcuucc

SEQ ID NO: 1093 - RNA, 21 nt, Artificial Sequence
  Synthetic Construct
uugggggcuaucuucugcuuc

SEQ ID NO: 1094 - RNA, 21 nt, Artificial Sequence
  Synthetic Construct
guugggggcuaucuucugcuu

SEQ ID NO: 1095 - RNA, 21 nt, Artificial Sequence
  Synthetic Construct
uguugggggcuaucuucugcu

SEQ ID NO: 1096 - RNA, 21 nt, Artificial Sequence
  Synthetic Construct
guguugggggcuaucuucugc

SEQ ID NO: 1097 - RNA, 21 nt, Artificial Sequence
  Synthetic Construct
uguguugggggcuaucuucug

SEQ ID NO: 1098 - RNA, 21 nt, Artificial Sequence
  Synthetic Construct
auguguugggggcuaucuucu

SEQ ID NO: 1099 - RNA, 21 nt, Artificial Sequence
  Synthetic Construct
cauguguugggggcuaucuuc

SEQ ID NO: 1100 - RNA, 21 nt, Artificial Sequence
  Synthetic Construct
acauguguugggggcuaucuu

SEQ ID NO: 1101 - RNA, 21 nt, Artificial Sequence
  Synthetic Construct
cacauguguugggggcuaucu

SEQ ID NO: 1102 - RNA, 21 nt, Artificial Sequence
  Synthetic Construct
ucacauguguugggggcuauc

SEQ ID NO: 1103 - RNA, 21 nt, Artificial Sequence
  Synthetic Construct
gucacauguguugggggcuau

SEQ ID NO: 1104 - RNA, 21 nt, Artificial Sequence
  Synthetic Construct
agucacauguguugggggcua

SEQ ID NO: 1105 - RNA, 21 nt, Artificial Sequence
  Synthetic Construct
cagucacauguguugggggcu

SEQ ID NO: 1106 - RNA, 21 nt, Artificial Sequence
  Synthetic Construct
ccagucacauguguugggggc

SEQ ID NO: 1107 - RNA, 21 nt, Artificial Sequence
  Synthetic Construct
cccagucacauguguuggggg

SEQ ID NO: 1108 - RNA, 21 nt, Artificial Sequence
  Synthetic Construct
ccccagucacauguguugggg

SEQ ID NO: 1109 - RNA, 21 nt, Artificial Sequence
  Synthetic Construct
cccccagucacauguguuggg

SEQ ID NO: 1110 - RNA, 21 nt, Artificial Sequence
  Synthetic Construct
ccccccagucacauguguugg

SEQ ID NO: 1111 - RNA, 21 nt, Artificial Sequence
  Synthetic Construct
uccccccagucacauguguug

SEQ ID NO: 1112 - RNA, 21 nt, Artificial Sequence
  Synthetic Construct
auccccccagucacauguguu

SEQ ID NO: 1113 - RNA, 21 nt, Artificial Sequence
  Synthetic Construct
cauccccccagucacaugugu

SEQ ID NO: 1114 - RNA, 21 nt, Artificial Sequence
  Synthetic Construct
ccauccccccagucacaugug

SEQ ID NO: 1115 - RNA, 21 nt, Artificial Sequence
  Synthetic Construct
accauccccccagucacaugu

SEQ ID NO: 1116 - RNA, 21 nt, Artificial Sequence
  Synthetic Construct
gaccauccccccagucacaug

SEQ ID NO: 1117 - RNA, 21 nt, Artificial Sequence
  Synthetic Construct
ugaccauccccccagucacau

SEQ ID NO: 1118 - RNA, 21 nt, Artificial Sequence
  Synthetic Construct
uugaccauccccccagucaca

SEQ ID NO: 1119 - RNA, 21 nt, Artificial Sequence
  Synthetic Construct
guugaccauccccccagucac

SEQ ID NO: 1120 - RNA, 21 nt, Artificial Sequence
  Synthetic Construct
uguugaccauccccccaguca

SEQ ID NO: 1121 - RNA, 21 nt, Artificial Sequence
  Synthetic Construct
uuguugaccauccccccaguc

SEQ ID NO: 1122 - RNA, 21 nt, Artificial Sequence
  Synthetic Construct
cuuguugaccauccccccagu

SEQ ID NO: 1123 - RNA, 21 nt, Artificial Sequence
  Synthetic Construct
ucuuguugaccauccccccag

SEQ ID NO: 1124 - RNA, 21 nt, Artificial Sequence
  Synthetic Construct
uucuuguugaccaucccccca

SEQ ID NO: 1125 - RNA, 21 nt, Artificial Sequence
  Synthetic Construct
uuucuuguugaccaucccccc

SEQ ID NO: 1126 - RNA, 21 nt, Artificial Sequence
  Synthetic Construct
cuuucuuguugaccauccccc

SEQ ID NO: 1127 - RNA, 21 nt, Artificial Sequence
  Synthetic Construct
ccuuucuuguugaccaucccc

SEQ ID NO: 1128 - RNA, 21 nt, Artificial Sequence
  Synthetic Construct
uccuuucuuguugaccauccc

SEQ ID NO: 1129 - RNA, 21 nt, Artificial Sequence
  Synthetic Construct
uuccuuucuuguugaccaucc

SEQ ID NO: 1130 - RNA, 21 nt, Artificial Sequence
  Synthetic Construct
auuccuuucuuguugaccauc

SEQ ID NO: 1131 - RNA, 21 nt, Artificial Sequence
  Synthetic Construct
cauuccuuucuuguugaccau

SEQ ID NO: 1132 - RNA, 21 nt, Artificial Sequence
  Synthetic Construct
ccauuccuuucuuguugacca

SEQ ID NO: 1133 - RNA, 21 nt, Artificial Sequence
  Synthetic Construct
accauuccuuucuuguugacc

SEQ ID NO: 1134 - RNA, 21 nt, Artificial Sequence
  Synthetic Construct
caccauuccuuucuuguugac

SEQ ID NO: 1135 - RNA, 21 nt, Artificial Sequence
  Synthetic Construct
ucaccauuccuuucuuguuga

SEQ ID NO: 1136 - RNA, 21 nt, Artificial Sequence
  Synthetic Construct
cucaccauuccuuucuuguug

SEQ ID NO: 1137 - RNA, 21 nt, Artificial Sequence
  Synthetic Construct
acucaccauuccuuucuuguu

SEQ ID NO: 1138 - RNA, 21 nt, Artificial Sequence
  Synthetic Construct
cacucaccauuccuuucuugu

SEQ ID NO: 1139 - RNA, 21 nt, Artificial Sequence
  Synthetic Construct
ccacucaccauuccuuucuug

SEQ ID NO: 1140 - RNA, 21 nt, Artificial Sequence
  Synthetic Construct
accacucaccauuccuuucuu

SEQ ID NO: 1141 - RNA, 21 nt, Artificial Sequence
  Synthetic Construct
caccacucaccauuccuuucu

SEQ ID NO: 1142 - RNA, 21 nt, Artificial Sequence
  Synthetic Construct
ccaccacucaccauuccuuuc

SEQ ID NO: 1143 - RNA, 21 nt, Artificial Sequence
  Synthetic Construct
accaccacucaccauuccuuu

SEQ ID NO: 1144 - RNA, 21 nt, Artificial Sequence
  Synthetic Construct
caccaccacucaccauuccuu

SEQ ID NO: 1145 - RNA, 21 nt, Artificial Sequence
  Synthetic Construct
ccaccaccacucaccauuccu

SEQ ID NO: 1146 - RNA, 21 nt, Artificial Sequence
  Synthetic Construct
gccaccaccacucaccauucc

SEQ ID NO: 1147 - RNA, 21 nt, Artificial Sequence
  Synthetic Construct
agccaccaccacucaccauuc

SEQ ID NO: 1148 - RNA, 21 nt, Artificial Sequence
  Synthetic Construct
cagccaccaccacucaccauu

SEQ ID NO: 1149 - RNA, 21 nt, Artificial Sequence
  Synthetic Construct
acagccaccaccacucaccau

SEQ ID NO: 1150 - RNA, 21 nt, Artificial Sequence
  Synthetic Construct
cacagccaccaccacucacca

SEQ ID NO: 1151 - RNA, 21 nt, Artificial Sequence
  Synthetic Construct
gcacagccaccaccacucacc

SEQ ID NO: 1152 - RNA, 21 nt, Artificial Sequence
  Synthetic Construct
agcacagccaccaccacucac

SEQ ID NO: 1153 - RNA, 21 nt, Artificial Sequence
  Synthetic Construct
gagcacagccaccaccacuca

SEQ ID NO: 1154 - RNA, 21 nt, Artificial Sequence
  Synthetic Construct
agagcacagccaccaccacuc

SEQ ID NO: 1155 - RNA, 21 nt, Artificial Sequence
  Synthetic Construct
gagagcacagccaccaccacu

SEQ ID NO: 1156 - RNA, 21 nt, Artificial Sequence
  Synthetic Construct
ugagagcacagccaccaccac

SEQ ID NO: 1157 - RNA, 21 nt, Artificial Sequence
  Synthetic Construct
uugagagcacagccaccacca

SEQ ID NO: 1158 - RNA, 21 nt, Artificial Sequence
  Synthetic Construct
auugagagcacagccaccacc

SEQ ID NO: 1159 - RNA, 21 nt, Artificial Sequence
  Synthetic Construct
aauugagagcacagccaccac

SEQ ID NO: 1160 - RNA, 21 nt, Artificial Sequence
  Synthetic Construct
aaauugagagcacagccacca

SEQ ID NO: 1161 - RNA, 21 nt, Artificial Sequence
  Synthetic Construct
aaaauugagagcacagccacc

SEQ ID NO: 1162 - RNA, 21 nt, Artificial Sequence
  Synthetic Construct
gaaaauugagagcacagccac

SEQ ID NO: 1163 - RNA, 21 nt, Artificial Sequence
  Synthetic Construct
ggaaaauugagagcacagcca

SEQ ID NO: 1164 - RNA, 21 nt, Artificial Sequence
  Synthetic Construct
gggaaaauugagagcacagcc

SEQ ID NO: 1165 - RNA, 21 nt, Artificial Sequence
  Synthetic Construct
agggaaaauugagagcacagc

SEQ ID NO: 1166 - RNA, 21 nt, Artificial Sequence
  Synthetic Construct
cagggaaaauugagagcacag

SEQ ID NO: 1167 - RNA, 21 nt, Artificial Sequence
  Synthetic Construct
acagggaaaauugagagcaca

SEQ ID NO: 1168 - RNA, 21 nt, Artificial Sequence
  Synthetic Construct
gacagggaaaauugagagcac

SEQ ID NO: 1169 - RNA, 21 nt, Artificial Sequence
  Synthetic Construct
agacagggaaaauugagagca

SEQ ID NO: 1170 - RNA, 21 nt, Artificial Sequence
  Synthetic Construct
gagacagggaaaauugagagc

SEQ ID NO: 1171 - RNA, 21 nt, Artificial Sequence
  Synthetic Construct
ggagacagggaaaauugagag

SEQ ID NO: 1172 - RNA, 21 nt, Artificial Sequence
  Synthetic Construct
cggagacagggaaaauugaga

SEQ ID NO: 1173 - RNA, 21 nt, Artificial Sequence
  Synthetic Construct
acggagacagggaaaauugag

SEQ ID NO: 1174 - RNA, 21 nt, Artificial Sequence
  Synthetic Construct
uacggagacagggaaaauuga

SEQ ID NO: 1175 - RNA, 21 nt, Artificial Sequence
  Synthetic Construct
guacggagacagggaaaauug

SEQ ID NO: 1176 - RNA, 21 nt, Artificial Sequence
  Synthetic Construct
uguacggagacagggaaaauu

SEQ ID NO: 1177 - RNA, 21 nt, Artificial Sequence
  Synthetic Construct
cuguacggagacagggaaaau

SEQ ID NO: 1178 - RNA, 21 nt, Artificial Sequence
  Synthetic Construct
ccuguacggagacagggaaaa

SEQ ID NO: 1179 - RNA, 21 nt, Artificial Sequence
  Synthetic Construct
gccuguacggagacagggaaa

SEQ ID NO: 1180 - RNA, 21 nt, Artificial Sequence
  Synthetic Construct
agccuguacggagacagggaa

SEQ ID NO: 1181 - RNA, 21 nt, Artificial Sequence
  Synthetic Construct
gagccuguacggagacaggga

SEQ ID NO: 1182 - RNA, 21 nt, Artificial Sequence
  Synthetic Construct
agagccuguacggagacaggg

SEQ ID NO: 1183 - RNA, 21 nt, Artificial Sequence
  Synthetic Construct
cagagccuguacggagacagg

SEQ ID NO: 1184 - RNA, 21 nt, Artificial Sequence
  Synthetic Construct
acagagccuguacggagacag

SEQ ID NO: 1185 - RNA, 21 nt, Artificial Sequence
  Synthetic Construct
cacagagccuguacggagaca

SEQ ID NO: 1186 - RNA, 21 nt, Artificial Sequence
  Synthetic Construct
ccacagagccuguacggagac

SEQ ID NO: 1187 - RNA, 21 nt, Artificial Sequence
  Synthetic Construct
cccacagagccuguacggaga

SEQ ID NO: 1188 - RNA, 21 nt, Artificial Sequence
  Synthetic Construct
ucccacagagccuguacggag

SEQ ID NO: 1189 - RNA, 21 nt, Artificial Sequence
  Synthetic Construct
cucccacagagccuguacgga

SEQ ID NO: 1190 - RNA, 21 nt, Artificial Sequence
  Synthetic Construct
ccucccacagagccuguacgg

SEQ ID NO: 1191 - RNA, 21 nt, Artificial Sequence
  Synthetic Construct
uccucccacagagccuguacg

SEQ ID NO: 1192 - RNA, 21 nt, Artificial Sequence
  Synthetic Construct
auccucccacagagccuguac

SEQ ID NO: 1193 - RNA, 21 nt, Artificial Sequence
  Synthetic Construct
gauccucccacagagccugua

SEQ ID NO: 1194 - RNA, 21 nt, Artificial Sequence
  Synthetic Construct
ugauccucccacagagccugu

SEQ ID NO: 1195 - RNA, 21 nt, Artificial Sequence
  Synthetic Construct
cugauccucccacagagccug

SEQ ID NO: 1196 - RNA, 21 nt, Artificial Sequence
  Synthetic Construct
ccugauccucccacagagccu

SEQ ID NO: 1197 - RNA, 21 nt, Artificial Sequence
  Synthetic Construct
cccugauccucccacagagcc

SEQ ID NO: 1198 - RNA, 21 nt, Artificial Sequence
  Synthetic Construct
gcccugauccucccacagagc

SEQ ID NO: 1199 - RNA, 21 nt, Artificial Sequence
  Synthetic Construct
agcccugauccucccacagag

SEQ ID NO: 1200 - RNA, 21 nt, Artificial Sequence
  Synthetic Construct
cagcccugauccucccacaga

SEQ ID NO: 1201 - RNA, 21 nt, Artificial Sequence
  Synthetic Construct
ccagcccugauccucccacag

SEQ ID NO: 1202 - RNA, 21 nt, Artificial Sequence
  Synthetic Construct
cccagcccugauccucccaca

SEQ ID NO: 1203 - RNA, 21 nt, Artificial Sequence
  Synthetic Construct
ucccagcccugauccucccac

SEQ ID NO: 1204 - RNA, 21 nt, Artificial Sequence
  Synthetic Construct
uucccagcccugauccuccca

SEQ ID NO: 1205 - RNA, 21 nt, Artificial Sequence
  Synthetic Construct
guucccagcccugauccuccc

SEQ ID NO: 1206 - RNA, 21 nt, Artificial Sequence
  Synthetic Construct
aguucccagcccugauccucc

SEQ ID NO: 1207 - RNA, 21 nt, Artificial Sequence
  Synthetic Construct
gaguucccagcccugauccuc

SEQ ID NO: 1208 - RNA, 21 nt, Artificial Sequence
  Synthetic Construct
agaguucccagcccugauccu

SEQ ID NO: 1209 - RNA, 21 nt, Artificial Sequence
  Synthetic Construct
uagaguucccagcccugaucc

SEQ ID NO: 1210 - RNA, 21 nt, Artificial Sequence
  Synthetic Construct
cuagaguucccagcccugauc

SEQ ID NO: 1211 - RNA, 21 nt, Artificial Sequence
  Synthetic Construct
gcuagaguucccagcccugau

SEQ ID NO: 1212 - RNA, 21 nt, Artificial Sequence
  Synthetic Construct
ggcuagaguucccagcccuga

SEQ ID NO: 1213 - RNA, 21 nt, Artificial Sequence
  Synthetic Construct
gggcuagaguucccagcccug

SEQ ID NO: 1214 - RNA, 21 nt, Artificial Sequence
  Synthetic Construct
agggcuagaguucccagcccu

SEQ ID NO: 1215 - RNA, 21 nt, Artificial Sequence
  Synthetic Construct
cagggcuagaguucccagccc

SEQ ID NO: 1216 - RNA, 21 nt, Artificial Sequence
  Synthetic Construct
ccagggcuagaguucccagcc

SEQ ID NO: 1217 - RNA, 21 nt, Artificial Sequence
  Synthetic Construct
gccagggcuagaguucccagc

SEQ ID NO: 1218 - RNA, 21 nt, Artificial Sequence
  Synthetic Construct
ggccagggcuagaguucccag

SEQ ID NO: 1219 - RNA, 21 nt, Artificial Sequence
  Synthetic Construct
gggccagggcuagaguuccca

SEQ ID NO: 1220 - RNA, 21 nt, Artificial Sequence
  Synthetic Construct
agggccagggcuagaguuccc

SEQ ID NO: 1221 - RNA, 21 nt, Artificial Sequence
  Synthetic Construct
cagggccagggcuagaguucc

SEQ ID NO: 1222 - RNA, 21 nt, Artificial Sequence
  Synthetic Construct
ccagggccagggcuagaguuc

SEQ ID NO: 1223 - RNA, 21 nt, Artificial Sequence
  Synthetic Construct
cccagggccagggcuagaguu

SEQ ID NO: 1224 - RNA, 21 nt, Artificial Sequence
  Synthetic Construct
ccccagggccagggcuagagu

SEQ ID NO: 1225 - RNA, 21 nt, Artificial Sequence
  Synthetic Construct
uccccagggccagggcuagag

SEQ ID NO: 1226 - RNA, 21 nt, Artificial Sequence
  Synthetic Construct
auccccagggccagggcuaga

SEQ ID NO: 1227 - RNA, 21 nt, Artificial Sequence
  Synthetic Construct
gauccccagggccagggcuag

SEQ ID NO: 1228 - RNA, 21 nt, Artificial Sequence
  Synthetic Construct
ggauccccagggccagggcua

SEQ ID NO: 1229 - RNA, 21 nt, Artificial Sequence
  Synthetic Construct
aggauccccagggccagggcu

SEQ ID NO: 1230 - RNA, 21 nt, Artificial Sequence
  Synthetic Construct
caggauccccagggccagggc

SEQ ID NO: 1231 - RNA, 21 nt, Artificial Sequence
  Synthetic Construct
ccaggauccccagggccaggg

SEQ ID NO: 1232 - RNA, 21 nt, Artificial Sequence
  Synthetic Construct
cccaggauccccagggccagg

SEQ ID NO: 1233 - RNA, 21 nt, Artificial Sequence
  Synthetic Construct
ucccaggauccccagggccag

SEQ ID NO: 1234 - RNA, 21 nt, Artificial Sequence
  Synthetic Construct
cucccaggauccccagggcca

SEQ ID NO: 1235 - RNA, 21 nt, Artificial Sequence
  Synthetic Construct
ccucccaggauccccagggcc

SEQ ID NO: 1236 - RNA, 21 nt, Artificial Sequence
  Synthetic Construct
gccucccaggauccccagggc

SEQ ID NO: 1237 - RNA, 21 nt, Artificial Sequence
  Synthetic Construct
ggccucccaggauccccaggg

SEQ ID NO: 1238 - RNA, 21 nt, Artificial Sequence
  Synthetic Construct
aggccucccaggauccccagg

SEQ ID NO: 1239 - RNA, 21 nt, Artificial Sequence
  Synthetic Construct
caggccucccaggauccccag

SEQ ID NO: 1240 - RNA, 21 nt, Artificial Sequence
  Synthetic Construct
ccaggccucccaggaucccca

SEQ ID NO: 1241 - RNA, 21 nt, Artificial Sequence
  Synthetic Construct
cccaggccucccaggaucccc

SEQ ID NO: 1242 - RNA, 21 nt, Artificial Sequence
  Synthetic Construct
ccccaggccucccaggauccc

SEQ ID NO: 1243 - RNA, 21 nt, Artificial Sequence
  Synthetic Construct
uccccaggccucccaggaucc

SEQ ID NO: 1244 - RNA, 21 nt, Artificial Sequence
  Synthetic Construct
guccccaggccucccaggauc

SEQ ID NO: 1245 - RNA, 21 nt, Artificial Sequence
  Synthetic Construct
uguccccaggccucccaggau

SEQ ID NO: 1246 - RNA, 21 nt, Artificial Sequence
  Synthetic Construct
cuguccccaggccucccagga

SEQ ID NO: 1247 - RNA, 21 nt, Artificial Sequence
  Synthetic Construct
gcuguccccaggccucccagg

SEQ ID NO: 1248 - RNA, 21 nt, Artificial Sequence
  Synthetic Construct
ggcuguccccaggccucccag

SEQ ID NO: 1249 - RNA, 21 nt, Artificial Sequence
  Synthetic Construct
cggcuguccccaggccuccca

SEQ ID NO: 1250 - RNA, 21 nt, Artificial Sequence
  Synthetic Construct
gcggcuguccccaggccuccc

SEQ ID NO: 1251 - RNA, 21 nt, Artificial Sequence
  Synthetic Construct
ggcggcuguccccaggccucc

SEQ ID NO: 1252 - RNA, 21 nt, Artificial Sequence
  Synthetic Construct
gggcggcuguccccaggccuc

SEQ ID NO: 1253 - RNA, 21 nt, Artificial Sequence
  Synthetic Construct
agggcggcuguccccaggccu

SEQ ID NO: 1254 - RNA, 21 nt, Artificial Sequence
  Synthetic Construct
cagggcggcuguccccaggcc

SEQ ID NO: 1255 - RNA, 21 nt, Artificial Sequence
  Synthetic Construct
gcagggcggcuguccccaggc

SEQ ID NO: 1256 - RNA, 21 nt, Artificial Sequence
  Synthetic Construct
agcagggcggcuguccccagg

SEQ ID NO: 1257 - RNA, 21 nt, Artificial Sequence
  Synthetic Construct
gagcagggcggcuguccccag

SEQ ID NO: 1258 - RNA, 21 nt, Artificial Sequence
  Synthetic Construct
ugagcagggcggcugucccca

SEQ ID NO: 1259 - RNA, 21 nt, Artificial Sequence
  Synthetic Construct
augagcagggcggcugucccc

SEQ ID NO: 1260 - RNA, 21 nt, Artificial Sequence
  Synthetic Construct
aaugagcagggcggcuguccc

SEQ ID NO: 1261 - RNA, 21 nt, Artificial Sequence
  Synthetic Construct
caaugagcagggcggcugucc

SEQ ID NO: 1262 - RNA, 21 nt, Artificial Sequence
  Synthetic Construct
ccaaugagcagggcggcuguc

SEQ ID NO: 1263 - RNA, 21 nt, Artificial Sequence
  Synthetic Construct
cccaaugagcagggcggcugu

SEQ ID NO: 1264 - RNA, 21 nt, Artificial Sequence
  Synthetic Construct
ccccaaugagcagggcggcug

SEQ ID NO: 1265 - RNA, 21 nt, Artificial Sequence
  Synthetic Construct
accccaaugagcagggcggcu

SEQ ID NO: 1266 - RNA, 21 nt, Artificial Sequence
  Synthetic Construct
gaccccaaugagcagggcggc

SEQ ID NO: 1267 - RNA, 21 nt, Artificial Sequence
  Synthetic Construct
ugaccccaaugagcagggcgg

SEQ ID NO: 1268 - RNA, 21 nt, Artificial Sequence
  Synthetic Construct
augaccccaaugagcagggcg

SEQ ID NO: 1269 - RNA, 21 nt, Artificial Sequence
  Synthetic Construct
gaugaccccaaugagcagggc

SEQ ID NO: 1270 - RNA, 21 nt, Artificial Sequence
  Synthetic Construct
agaugaccccaaugagcaggg

SEQ ID NO: 1271 - RNA, 21 nt, Artificial Sequence
  Synthetic Construct
aagaugaccccaaugagcagg

SEQ ID NO: 1272 - RNA, 21 nt, Artificial Sequence
  Synthetic Construct
caagaugaccccaaugagcag

SEQ ID NO: 1273 - RNA, 21 nt, Artificial Sequence
  Synthetic Construct
acaagaugaccccaaugagca

SEQ ID NO: 1274 - RNA, 21 nt, Artificial Sequence
  Synthetic Construct
cacaagaugaccccaaugagc

SEQ ID NO: 1275 - RNA, 21 nt, Artificial Sequence
  Synthetic Construct
ccacaagaugaccccaaugag

SEQ ID NO: 1276 - RNA, 21 nt, Artificial Sequence
  Synthetic Construct
gccacaagaugaccccaauga

SEQ ID NO: 1277 - RNA, 21 nt, Artificial Sequence
  Synthetic Construct
ugccacaagaugaccccaaug

SEQ ID NO: 1278 - RNA, 21 nt, Artificial Sequence
  Synthetic Construct
uugccacaagaugaccccaau

SEQ ID NO: 1279 - RNA, 21 nt, Artificial Sequence
  Synthetic Construct
uuugccacaagaugaccccaa

SEQ ID NO: 1280 - RNA, 21 nt, Artificial Sequence
  Synthetic Construct
cuuugccacaagaugacccca

SEQ ID NO: 1281 - RNA, 21 nt, Artificial Sequence
  Synthetic Construct
ccuuugccacaagaugacccc

SEQ ID NO: 1282 - RNA, 21 nt, Artificial Sequence
  Synthetic Construct
gccuuugccacaagaugaccc

SEQ ID NO: 1283 - RNA, 21 nt, Artificial Sequence
  Synthetic Construct
cgccuuugccacaagaugacc

SEQ ID NO: 1284 - RNA, 21 nt, Artificial Sequence
  Synthetic Construct
ccgccuuugccacaagaugac

SEQ ID NO: 1285 - RNA, 21 nt, Artificial Sequence
  Synthetic Construct
gccgccuuugccacaagauga

SEQ ID NO: 1286 - RNA, 21 nt, Artificial Sequence
  Synthetic Construct
ugccgccuuugccacaagaug

SEQ ID NO: 1287 - RNA, 21 nt, Artificial Sequence
  Synthetic Construct
uugccgccuuugccacaagau

SEQ ID NO: 1288 - RNA, 21 nt, Artificial Sequence
  Synthetic Construct
guugccgccuuugccacaaga

SEQ ID NO: 1289 - RNA, 21 nt, Artificial Sequence
  Synthetic Construct
cguugccgccuuugccacaag

SEQ ID NO: 1290 - RNA, 21 nt, Artificial Sequence
  Synthetic Construct
gcguugccgccuuugccacaa

SEQ ID NO: 1291 - RNA, 21 nt, Artificial Sequence
  Synthetic Construct
ggcguugccgccuuugccaca

SEQ ID NO: 1292 - RNA, 21 nt, Artificial Sequence
  Synthetic Construct
cggcguugccgccuuugccac

SEQ ID NO: 1293 - RNA, 21 nt, Artificial Sequence
  Synthetic Construct
ucggcguugccgccuuugcca

SEQ ID NO: 1294 - RNA, 21 nt, Artificial Sequence
  Synthetic Construct
cucggcguugccgccuuugcc

SEQ ID NO: 1295 - RNA, 21 nt, Artificial Sequence
  Synthetic Construct
ccucggcguugccgccuuugc

SEQ ID NO: 1296 - RNA, 21 nt, Artificial Sequence
  Synthetic Construct
uccucggcguugccgccuuug

SEQ ID NO: 1297 - RNA, 21 nt, Artificial Sequence
  Synthetic Construct
cuccucggcguugccgccuuu

SEQ ID NO: 1298 - RNA, 21 nt, Artificial Sequence
  Synthetic Construct
ucuccucggcguugccgccuu

SEQ ID NO: 1299 - RNA, 21 nt, Artificial Sequence
  Synthetic Construct
cucuccucggcguugccgccu

SEQ ID NO: 1300 - RNA, 21 nt, Artificial Sequence
  Synthetic Construct
ccucuccucggcguugccgcc

SEQ ID NO: 1301 - RNA, 21 nt, Artificial Sequence
  Synthetic Construct
uccucuccucggcguugccgc

SEQ ID NO: 1302 - RNA, 21 nt, Artificial Sequence
  Synthetic Construct
cuccucuccucggcguugccg

SEQ ID NO: 1303 - RNA, 21 nt, Artificial Sequence
  Synthetic Construct
ucuccucuccucggcguugcc

SEQ ID NO: 1304 - RNA, 21 nt, Artificial Sequence
  Synthetic Construct
cucuccucuccucggcguugc

SEQ ID NO: 1305 - RNA, 20 nt, Artificial Sequence
  Synthetic Construct
uggccccuccucgccugguu

SEQ ID NO: 1306 - RNA, 20 nt, Artificial Sequence
  Synthetic Construct
uuggccccuccucgccuggu

SEQ ID NO: 1307 - RNA, 20 nt, Artificial Sequence
  Synthetic Construct
guuggccccuccucgccugg

SEQ ID NO: 1308 - RNA, 20 nt, Artificial Sequence
  Synthetic Construct
aguuggccccuccucgccug

SEQ ID NO: 1309 - RNA, 20 nt, Artificial Sequence
  Synthetic Construct
caguuggccccuccucgccu

SEQ ID NO: 1310 - RNA, 20 nt, Artificial Sequence
  Synthetic Construct
gcaguuggccccuccucgcc

SEQ ID NO: 1311 - RNA, 20 nt, Artificial Sequence
  Synthetic Construct
ugcaguuggccccuccucgc

SEQ ID NO: 1312 - RNA, 20 nt, Artificial Sequence
  Synthetic Construct
cugcaguuggccccuccucg

SEQ ID NO: 1313 - RNA, 20 nt, Artificial Sequence
  Synthetic Construct
ccugcaguuggccccuccuc

SEQ ID NO: 1314 - RNA, 20 nt, Artificial Sequence
  Synthetic Construct
accugcaguuggccccuccu

SEQ ID NO: 1315 - RNA, 20 nt, Artificial Sequence
  Synthetic Construct
caccugcaguuggccccucc

SEQ ID NO: 1316 - RNA, 20 nt, Artificial Sequence
  Synthetic Construct
ucaccugcaguuggccccuc

SEQ ID NO: 1317 - RNA, 20 nt, Artificial Sequence
  Synthetic Construct
cucaccugcaguuggccccu

SEQ ID NO: 1318 - RNA, 20 nt, Artificial Sequence
  Synthetic Construct
ccucaccugcaguuggcccc

SEQ ID NO: 1319 - RNA, 20 nt, Artificial Sequence
  Synthetic Construct
cccucaccugcaguuggccc

SEQ ID NO: 1320 - RNA, 20 nt, Artificial Sequence
  Synthetic Construct
ccccucaccugcaguuggcc

SEQ ID NO: 1321 - RNA, 20 nt, Artificial Sequence
  Synthetic Construct
accccucaccugcaguuggc

SEQ ID NO: 1322 - RNA, 20 nt, Artificial Sequence
  Synthetic Construct
aaccccucaccugcaguugg

SEQ ID NO: 1323 - RNA, 20 nt, Artificial Sequence
  Synthetic Construct
aaaccccucaccugcaguug

SEQ ID NO: 1324 - RNA, 20 nt, Artificial Sequence
  Synthetic Construct
caaaccccucaccugcaguu

SEQ ID NO: 1325 - RNA, 20 nt, Artificial Sequence
  Synthetic Construct
ucaaaccccucaccugcagu

SEQ ID NO: 1326 - RNA, 20 nt, Artificial Sequence
  Synthetic Construct
aucaaaccccucaccugcag

SEQ ID NO: 1327 - RNA, 20 nt, Artificial Sequence
  Synthetic Construct
uaucaaaccccucaccugca

SEQ ID NO: 1328 - RNA, 20 nt, Artificial Sequence
  Synthetic Construct
uuaucaaaccccucaccugc

SEQ ID NO: 1329 - RNA, 20 nt, Artificial Sequence
  Synthetic Construct
uuuaucaaaccccucaccug

SEQ ID NO: 1330 - RNA, 20 nt, Artificial Sequence
  Synthetic Construct
cuuuaucaaaccccucaccu

SEQ ID NO: 1331 - RNA, 20 nt, Artificial Sequence
  Synthetic Construct
acuuuaucaaaccccucacc

SEQ ID NO: 1332 - RNA, 20 nt, Artificial Sequence
  Synthetic Construct
gacuuuaucaaaccccucac

SEQ ID NO: 1333 - RNA, 20 nt, Artificial Sequence
  Synthetic Construct
ugacuuuaucaaaccccuca

SEQ ID NO: 1334 - RNA, 20 nt, Artificial Sequence
  Synthetic Construct
cugacuuuaucaaaccccuc

SEQ ID NO: 1335 - RNA, 20 nt, Artificial Sequence
  Synthetic Construct
ccugacuuuaucaaaccccu

SEQ ID NO: 1336 - RNA, 20 nt, Artificial Sequence
  Synthetic Construct
cccugacuuuaucaaacccc

SEQ ID NO: 1337 - RNA, 20 nt, Artificial Sequence
  Synthetic Construct
ucccugacuuuaucaaaccc

SEQ ID NO: 1338 - RNA, 20 nt, Artificial Sequence
  Synthetic Construct
uucccugacuuuaucaaacc

SEQ ID NO: 1339 - RNA, 20 nt, Artificial Sequence
  Synthetic Construct
cuucccugacuuuaucaaac

SEQ ID NO: 1340 - RNA, 20 nt, Artificial Sequence
  Synthetic Construct
gcuucccugacuuuaucaaa

SEQ ID NO: 1341 - RNA, 20 nt, Artificial Sequence
  Synthetic Construct
ugcuucccugacuuuaucaa

SEQ ID NO: 1342 - RNA, 20 nt, Artificial Sequence
  Synthetic Construct
cugcuucccugacuuuauca

SEQ ID NO: 1343 - RNA, 20 nt, Artificial Sequence
  Synthetic Construct
ucugcuucccugacuuuauc

SEQ ID NO: 1344 - RNA, 20 nt, Artificial Sequence
  Synthetic Construct
uucugcuucccugacuuuau

SEQ ID NO: 1345 - RNA, 20 nt, Artificial Sequence
  Synthetic Construct
cuucugcuucccugacuuua

SEQ ID NO: 1346 - RNA, 20 nt, Artificial Sequence
  Synthetic Construct
ucuucugcuucccugacuuu

SEQ ID NO: 1347 - RNA, 20 nt, Artificial Sequence
  Synthetic Construct
aucuucugcuucccugacuu

SEQ ID NO: 1348 - RNA, 20 nt, Artificial Sequence
  Synthetic Construct
uaucuucugcuucccugacu

SEQ ID NO: 1349 - RNA, 20 nt, Artificial Sequence
  Synthetic Construct
cuaucuucugcuucccugac

SEQ ID NO: 1350 - RNA, 20 nt, Artificial Sequence
  Synthetic Construct
gcuaucuucugcuucccuga

SEQ ID NO: 1351 - RNA, 20 nt, Artificial Sequence
  Synthetic Construct
ggcuaucuucugcuucccug

SEQ ID NO: 1352 - RNA, 20 nt, Artificial Sequence
  Synthetic Construct
gggcuaucuucugcuucccu

SEQ ID NO: 1353 - RNA, 20 nt, Artificial Sequence
  Synthetic Construct
ggggcuaucuucugcuuccc

SEQ ID NO: 1354 - RNA, 20 nt, Artificial Sequence
  Synthetic Construct
gggggcuaucuucugcuucc

SEQ ID NO: 1355 - RNA, 20 nt, Artificial Sequence
  Synthetic Construct
ugggggcuaucuucugcuuc

SEQ ID NO: 1356 - RNA, 20 nt, Artificial Sequence
  Synthetic Construct
uugggggcuaucuucugcuu

SEQ ID NO: 1357 - RNA, 20 nt, Artificial Sequence
  Synthetic Construct
guugggggcuaucuucugcu

SEQ ID NO: 1358 - RNA, 20 nt, Artificial Sequence
  Synthetic Construct
uguugggggcuaucuucugc

SEQ ID NO: 1359 - RNA, 20 nt, Artificial Sequence
  Synthetic Construct
guguugggggcuaucuucug

SEQ ID NO: 1360 - RNA, 20 nt, Artificial Sequence
  Synthetic Construct
uguguugggggcuaucuucu

SEQ ID NO: 1361 - RNA, 20 nt, Artificial Sequence
  Synthetic Construct
auguguugggggcuaucuuc

SEQ ID NO: 1362 - RNA, 20 nt, Artificial Sequence
  Synthetic Construct
cauguguugggggcuaucuu

SEQ ID NO: 1363 - RNA, 20 nt, Artificial Sequence
  Synthetic Construct
acauguguugggggcuaucu

SEQ ID NO: 1364 - RNA, 20 nt, Artificial Sequence
  Synthetic Construct
cacauguguugggggcuauc

SEQ ID NO: 1365 - RNA, 20 nt, Artificial Sequence
  Synthetic Construct
ucacauguguugggggcuau

SEQ ID NO: 1366 - RNA, 20 nt, Artificial Sequence
  Synthetic Construct
gucacauguguugggggcua

SEQ ID NO: 1367 - RNA, 20 nt, Artificial Sequence
  Synthetic Construct
agucacauguguugggggcu

SEQ ID NO: 1368 - RNA, 20 nt, Artificial Sequence
  Synthetic Construct
cagucacauguguugggggc

SEQ ID NO: 1369 - RNA, 20 nt, Artificial Sequence
  Synthetic Construct
ccagucacauguguuggggg

SEQ ID NO: 1370 - RNA, 20 nt, Artificial Sequence
  Synthetic Construct
cccagucacauguguugggg

SEQ ID NO: 1371 - RNA, 20 nt, Artificial Sequence
  Synthetic Construct
ccccagucacauguguuggg

SEQ ID NO: 1372 - RNA, 20 nt, Artificial Sequence
  Synthetic Construct
cccccagucacauguguugg

SEQ ID NO: 1373 - RNA, 20 nt, Artificial Sequence
  Synthetic Construct
ccccccagucacauguguug

SEQ ID NO: 1374 - RNA, 20 nt, Artificial Sequence
  Synthetic Construct
uccccccagucacauguguu

SEQ ID NO: 1375 - RNA, 20 nt, Artificial Sequence
  Synthetic Construct
auccccccagucacaugugu

SEQ ID NO: 1376 - RNA, 20 nt, Artificial Sequence
  Synthetic Construct
cauccccccagucacaugug

SEQ ID NO: 1377 - RNA, 20 nt, Artificial Sequence
  Synthetic Construct
ccauccccccagucacaugu

SEQ ID NO: 1378 - RNA, 20 nt, Artificial Sequence
  Synthetic Construct
accauccccccagucacaug

SEQ ID NO: 1379 - RNA, 20 nt, Artificial Sequence
  Synthetic Construct
gaccauccccccagucacau

SEQ ID NO: 1380 - RNA, 20 nt, Artificial Sequence
  Synthetic Construct
ugaccauccccccagucaca

SEQ ID NO: 1381 - RNA, 20 nt, Artificial Sequence
  Synthetic Construct
uugaccauccccccagucac

SEQ ID NO: 1382 - RNA, 20 nt, Artificial Sequence
  Synthetic Construct
guugaccauccccccaguca

SEQ ID NO: 1383 - RNA, 20 nt, Artificial Sequence
  Synthetic Construct
uguugaccauccccccaguc

SEQ ID NO: 1384 - RNA, 20 nt, Artificial Sequence
  Synthetic Construct
uuguugaccauccccccagu

SEQ ID NO: 1385 - RNA, 20 nt, Artificial Sequence
  Synthetic Construct
cuuguugaccauccccccag

SEQ ID NO: 1386 - RNA, 20 nt, Artificial Sequence
  Synthetic Construct
ucuuguugaccaucccccca

SEQ ID NO: 1387 - RNA, 20 nt, Artificial Sequence
  Synthetic Construct
uucuuguugaccaucccccc

SEQ ID NO: 1388 - RNA, 20 nt, Artificial Sequence
  Synthetic Construct
uuucuuguugaccauccccc

SEQ ID NO: 1389 - RNA, 20 nt, Artificial Sequence
  Synthetic Construct
cuuucuuguugaccaucccc

SEQ ID NO: 1390 - RNA, 20 nt, Artificial Sequence
  Synthetic Construct
ccuuucuuguugaccauccc

SEQ ID NO: 1391 - RNA, 20 nt, Artificial Sequence
  Synthetic Construct
uccuuucuuguugaccaucc

SEQ ID NO: 1392 - RNA, 20 nt, Artificial Sequence
  Synthetic Construct
uuccuuucuuguugaccauc

SEQ ID NO: 1393 - RNA, 20 nt, Artificial Sequence
  Synthetic Construct
auuccuuucuuguugaccau

SEQ ID NO: 1394 - RNA, 20 nt, Artificial Sequence
  Synthetic Construct
cauuccuuucuuguugacca

SEQ ID NO: 1395 - RNA, 20 nt, Artificial Sequence
  Synthetic Construct
ccauuccuuucuuguugacc

SEQ ID NO: 1396 - RNA, 20 nt, Artificial Sequence
  Synthetic Construct
accauuccuuucuuguugac

SEQ ID NO: 1397 - RNA, 20 nt, Artificial Sequence
  Synthetic Construct
caccauuccuuucuuguuga

SEQ ID NO: 1398 - RNA, 20 nt, Artificial Sequence
  Synthetic Construct
ucaccauuccuuucuuguug

SEQ ID NO: 1399 - RNA, 20 nt, Artificial Sequence
  Synthetic Construct
cucaccauuccuuucuuguu

SEQ ID NO: 1400 - RNA, 20 nt, Artificial Sequence
  Synthetic Construct
acucaccauuccuuucuugu

SEQ ID NO: 1401 - RNA, 20 nt, Artificial Sequence
  Synthetic Construct
cacucaccauuccuuucuug

SEQ ID NO: 1402 - RNA, 20 nt, Artificial Sequence
  Synthetic Construct
ccacucaccauuccuuucuu

SEQ ID NO: 1403 - RNA, 20 nt, Artificial Sequence
  Synthetic Construct
accacucaccauuccuuucu

SEQ ID NO: 1404 - RNA, 20 nt, Artificial Sequence
  Synthetic Construct
caccacucaccauuccuuuc

SEQ ID NO: 1405 - RNA, 20 nt, Artificial Sequence
  Synthetic Construct
ccaccacucaccauuccuuu

SEQ ID NO: 1406 - RNA, 20 nt, Artificial Sequence
  Synthetic Construct
accaccacucaccauuccuu

SEQ ID NO: 1407 - RNA, 20 nt, Artificial Sequence
  Synthetic Construct
caccaccacucaccauuccu

SEQ ID NO: 1408 - RNA, 20 nt, Artificial Sequence
  Synthetic Construct
ccaccaccacucaccauucc

SEQ ID NO: 1409 - RNA, 20 nt, Artificial Sequence
  Synthetic Construct
gccaccaccacucaccauuc

SEQ ID NO: 1410 - RNA, 20 nt, Artificial Sequence
  Synthetic Construct
agccaccaccacucaccauu

SEQ ID NO: 1411 - RNA, 20 nt, Artificial Sequence
  Synthetic Construct
cagccaccaccacucaccau

SEQ ID NO: 1412 - RNA, 20 nt, Artificial Sequence
  Synthetic Construct
acagccaccaccacucacca

SEQ ID NO: 1413 - RNA, 20 nt, Artificial Sequence
  Synthetic Construct
cacagccaccaccacucacc

SEQ ID NO: 1414 - RNA, 20 nt, Artificial Sequence
  Synthetic Construct
gcacagccaccaccacucac

SEQ ID NO: 1415 - RNA, 20 nt, Artificial Sequence
  Synthetic Construct
agcacagccaccaccacuca

SEQ ID NO: 1416 - RNA, 20 nt, Artificial Sequence
  Synthetic Construct
gagcacagccaccaccacuc

SEQ ID NO: 1417 - RNA, 20 nt, Artificial Sequence
  Synthetic Construct
agagcacagccaccaccacu

SEQ ID NO: 1418 - RNA, 20 nt, Artificial Sequence
  Synthetic Construct
gagagcacagccaccaccac

SEQ ID NO: 1419 - RNA, 20 nt, Artificial Sequence
  Synthetic Construct
ugagagcacagccaccacca

SEQ ID NO: 1420 - RNA, 20 nt, Artificial Sequence
  Synthetic Construct
uugagagcacagccaccacc

SEQ ID NO: 1421 - RNA, 20 nt, Artificial Sequence
  Synthetic Construct
auugagagcacagccaccac

SEQ ID NO: 1422 - RNA, 20 nt, Artificial Sequence
  Synthetic Construct
aauugagagcacagccacca

SEQ ID NO: 1423 - RNA, 20 nt, Artificial Sequence
  Synthetic Construct
aaauugagagcacagccacc

SEQ ID NO: 1424 - RNA, 20 nt, Artificial Sequence
  Synthetic Construct
aaaauugagagcacagccac

SEQ ID NO: 1425 - RNA, 20 nt, Artificial Sequence
  Synthetic Construct
gaaaauugagagcacagcca

SEQ ID NO: 1426 - RNA, 20 nt, Artificial Sequence
  Synthetic Construct
ggaaaauugagagcacagcc

SEQ ID NO: 1427 - RNA, 20 nt, Artificial Sequence
  Synthetic Construct
gggaaaauugagagcacagc

SEQ ID NO: 1428 - RNA, 20 nt, Artificial Sequence
  Synthetic Construct
agggaaaauugagagcacag

SEQ ID NO: 1429 - RNA, 20 nt, Artificial Sequence
  Synthetic Construct
cagggaaaauugagagcaca

SEQ ID NO: 1430 - RNA, 20 nt, Artificial Sequence
  Synthetic Construct
acagggaaaauugagagcac

SEQ ID NO: 1431 - RNA, 20 nt, Artificial Sequence
  Synthetic Construct
gacagggaaaauugagagca

SEQ ID NO: 1432 - RNA, 20 nt, Artificial Sequence
  Synthetic Construct
agacagggaaaauugagagc

SEQ ID NO: 1433 - RNA, 20 nt, Artificial Sequence
  Synthetic Construct
gagacagggaaaauugagag

SEQ ID NO: 1434 - RNA, 20 nt, Artificial Sequence
  Synthetic Construct
ggagacagggaaaauugaga

SEQ ID NO: 1435 - RNA, 20 nt, Artificial Sequence
  Synthetic Construct
cggagacagggaaaauugag

SEQ ID NO: 1436 - RNA, 20 nt, Artificial Sequence
  Synthetic Construct
acggagacagggaaaauuga

SEQ ID NO: 1437 - RNA, 20 nt, Artificial Sequence
  Synthetic Construct
uacggagacagggaaaauug

SEQ ID NO: 1438 - RNA, 20 nt, Artificial Sequence
  Synthetic Construct
guacggagacagggaaaauu

SEQ ID NO: 1439 - RNA, 20 nt, Artificial Sequence
  Synthetic Construct
uguacggagacagggaaaau

SEQ ID NO: 1440 - RNA, 20 nt, Artificial Sequence
  Synthetic Construct
cuguacggagacagggaaaa

SEQ ID NO: 1441 - RNA, 20 nt, Artificial Sequence
  Synthetic Construct
ccuguacggagacagggaaa

SEQ ID NO: 1442 - RNA, 20 nt, Artificial Sequence
  Synthetic Construct
gccuguacggagacagggaa

SEQ ID NO: 1443 - RNA, 20 nt, Artificial Sequence
  Synthetic Construct
agccuguacggagacaggga

SEQ ID NO: 1444 - RNA, 20 nt, Artificial Sequence
  Synthetic Construct
gagccuguacggagacaggg

SEQ ID NO: 1445 - RNA, 20 nt, Artificial Sequence
  Synthetic Construct
agagccuguacggagacagg

SEQ ID NO: 1446 - RNA, 20 nt, Artificial Sequence
  Synthetic Construct
cagagccuguacggagacag

SEQ ID NO: 1447 - RNA, 20 nt, Artificial Sequence
  Synthetic Construct
acagagccuguacggagaca

SEQ ID NO: 1448 - RNA, 20 nt, Artificial Sequence
  Synthetic Construct
cacagagccuguacggagac

SEQ ID NO: 1449 - RNA, 20 nt, Artificial Sequence
  Synthetic Construct
ccacagagccuguacggaga

SEQ ID NO: 1450 - RNA, 20 nt, Artificial Sequence
  Synthetic Construct
cccacagagccuguacggag

SEQ ID NO: 1451 - RNA, 20 nt, Artificial Sequence
  Synthetic Construct
ucccacagagccuguacgga

SEQ ID NO: 1452 - RNA, 20 nt, Artificial Sequence
  Synthetic Construct
cucccacagagccuguacgg

SEQ ID NO: 1453 - RNA, 20 nt, Artificial Sequence
  Synthetic Construct
ccucccacagagccuguacg

SEQ ID NO: 1454 - RNA, 20 nt, Artificial Sequence
  Synthetic Construct
uccucccacagagccuguac

SEQ ID NO: 1455 - RNA, 20 nt, Artificial Sequence
  Synthetic Construct
auccucccacagagccugua

SEQ ID NO: 1456 - RNA, 20 nt, Artificial Sequence
  Synthetic Construct
gauccucccacagagccugu

SEQ ID NO: 1457 - RNA, 20 nt, Artificial Sequence
  Synthetic Construct
ugauccucccacagagccug

SEQ ID NO: 1458 - RNA, 20 nt, Artificial Sequence
  Synthetic Construct
cugauccucccacagagccu

SEQ ID NO: 1459 - RNA, 20 nt, Artificial Sequence
  Synthetic Construct
ccugauccucccacagagcc

SEQ ID NO: 1460 - RNA, 20 nt, Artificial Sequence
  Synthetic Construct
cccugauccucccacagagc

SEQ ID NO: 1461 - RNA, 20 nt, Artificial Sequence
  Synthetic Construct
gcccugauccucccacagag

SEQ ID NO: 1462 - RNA, 20 nt, Artificial Sequence
  Synthetic Construct
agcccugauccucccacaga

SEQ ID NO: 1463 - RNA, 20 nt, Artificial Sequence
  Synthetic Construct
cagcccugauccucccacag

SEQ ID NO: 1464 - RNA, 20 nt, Artificial Sequence
  Synthetic Construct
ccagcccugauccucccaca

SEQ ID NO: 1465 - RNA, 20 nt, Artificial Sequence
  Synthetic Construct
cccagcccugauccucccac

SEQ ID NO: 1466 - RNA, 20 nt, Artificial Sequence
  Synthetic Construct
ucccagcccugauccuccca

SEQ ID NO: 1467 - RNA, 20 nt, Artificial Sequence
  Synthetic Construct
uucccagcccugauccuccc

SEQ ID NO: 1468 - RNA, 20 nt, Artificial Sequence
  Synthetic Construct
guucccagcccugauccucc

SEQ ID NO: 1469 - RNA, 20 nt, Artificial Sequence
  Synthetic Construct
aguucccagcccugauccuc

SEQ ID NO: 1470 - RNA, 20 nt, Artificial Sequence
  Synthetic Construct
gaguucccagcccugauccu

SEQ ID NO: 1471 - RNA, 20 nt, Artificial Sequence
  Synthetic Construct
agaguucccagcccugaucc

SEQ ID NO: 1472 - RNA, 20 nt, Artificial Sequence
  Synthetic Construct
uagaguucccagcccugauc

SEQ ID NO: 1473 - RNA, 20 nt, Artificial Sequence
  Synthetic Construct
cuagaguucccagcccugau

SEQ ID NO: 1474 - RNA, 20 nt, Artificial Sequence
  Synthetic Construct
gcuagaguucccagcccuga

SEQ ID NO: 1475 - RNA, 20 nt, Artificial Sequence
  Synthetic Construct
ggcuagaguucccagcccug

SEQ ID NO: 1476 - RNA, 20 nt, Artificial Sequence
  Synthetic Construct
gggcuagaguucccagcccu

SEQ ID NO: 1477 - RNA, 20 nt, Artificial Sequence
  Synthetic Construct
agggcuagaguucccagccc

SEQ ID NO: 1478 - RNA, 20 nt, Artificial Sequence
  Synthetic Construct
cagggcuagaguucccagcc

SEQ ID NO: 1479 - RNA, 20 nt, Artificial Sequence
  Synthetic Construct
ccagggcuagaguucccagc

SEQ ID NO: 1480 - RNA, 20 nt, Artificial Sequence
  Synthetic Construct
gccagggcuagaguucccag

SEQ ID NO: 1481 - RNA, 20 nt, Artificial Sequence
  Synthetic Construct
ggccagggcuagaguuccca

SEQ ID NO: 1482 - RNA, 20 nt, Artificial Sequence
  Synthetic Construct
gggccagggcuagaguuccc

SEQ ID NO: 1483 - RNA, 20 nt, Artificial Sequence
  Synthetic Construct
agggccagggcuagaguucc

SEQ ID NO: 1484 - RNA, 20 nt, Artificial Sequence
  Synthetic Construct
cagggccagggcuagaguuc

SEQ ID NO: 1485 - RNA, 20 nt, Artificial Sequence
  Synthetic Construct
ccagggccagggcuagaguu

SEQ ID NO: 1486 - RNA, 20 nt, Artificial Sequence
  Synthetic Construct
cccagggccagggcuagagu

SEQ ID NO: 1487 - RNA, 20 nt, Artificial Sequence
  Synthetic Construct
ccccagggccagggcuagag

SEQ ID NO: 1488 - RNA, 20 nt, Artificial Sequence
  Synthetic Construct
uccccagggccagggcuaga

SEQ ID NO: 1489 - RNA, 20 nt, Artificial Sequence
  Synthetic Construct
auccccagggccagggcuag

SEQ ID NO: 1490 - RNA, 20 nt, Artificial Sequence
  Synthetic Construct
gauccccagggccagggcua

SEQ ID NO: 1491 - RNA, 20 nt, Artificial Sequence
  Synthetic Construct
ggauccccagggccagggcu

SEQ ID NO: 1492 - RNA, 20 nt, Artificial Sequence
  Synthetic Construct
aggauccccagggccagggc

SEQ ID NO: 1493 - RNA, 20 nt, Artificial Sequence
  Synthetic Construct
caggauccccagggccaggg

SEQ ID NO: 1494 - RNA, 20 nt, Artificial Sequence
  Synthetic Construct
ccaggauccccagggccagg

SEQ ID NO: 1495 - RNA, 20 nt, Artificial Sequence
  Synthetic Construct
cccaggauccccagggccag

SEQ ID NO: 1496 - RNA, 20 nt, Artificial Sequence
  Synthetic Construct
ucccaggauccccagggcca

SEQ ID NO: 1497 - RNA, 20 nt, Artificial Sequence
  Synthetic Construct
cucccaggauccccagggcc

SEQ ID NO: 1498 - RNA, 20 nt, Artificial Sequence
  Synthetic Construct
ccucccaggauccccagggc

SEQ ID NO: 1499 - RNA, 20 nt, Artificial Sequence
  Synthetic Construct
gccucccaggauccccaggg

SEQ ID NO: 1500 - RNA, 20 nt, Artificial Sequence
  Synthetic Construct
ggccucccaggauccccagg

SEQ ID NO: 1501 - RNA, 20 nt, Artificial Sequence
  Synthetic Construct
aggccucccaggauccccag

SEQ ID NO: 1502 - RNA, 20 nt, Artificial Sequence
  Synthetic Construct
caggccucccaggaucccca

SEQ ID NO: 1503 - RNA, 20 nt, Artificial Sequence
  Synthetic Construct
ccaggccucccaggaucccc

SEQ ID NO: 1504 - RNA, 20 nt, Artificial Sequence
  Synthetic Construct
cccaggccucccaggauccc

SEQ ID NO: 1505 - RNA, 20 nt, Artificial Sequence
  Synthetic Construct
ccccaggccucccaggaucc

SEQ ID NO: 1506 - RNA, 20 nt, Artificial Sequence
  Synthetic Construct
uccccaggccucccaggauc

SEQ ID NO: 1507 - RNA, 20 nt, Artificial Sequence
  Synthetic Construct
guccccaggccucccaggau

SEQ ID NO: 1508 - RNA, 20 nt, Artificial Sequence
  Synthetic Construct
uguccccaggccucccagga

SEQ ID NO: 1509 - RNA, 20 nt, Artificial Sequence
  Synthetic Construct
cuguccccaggccucccagg

SEQ ID NO: 1510 - RNA, 20 nt, Artificial Sequence
  Synthetic Construct
gcuguccccaggccucccag

SEQ ID NO: 1511 - RNA, 20 nt, Artificial Sequence
  Synthetic Construct
ggcuguccccaggccuccca

SEQ ID NO: 1512 - RNA, 20 nt, Artificial Sequence
  Synthetic Construct
cggcuguccccaggccuccc

SEQ ID NO: 1513 - RNA, 20 nt, Artificial Sequence
  Synthetic Construct
gcggcuguccccaggccucc

SEQ ID NO: 1514 - RNA, 20 nt, Artificial Sequence
  Synthetic Construct
ggcggcuguccccaggccuc

SEQ ID NO: 1515 - RNA, 20 nt, Artificial Sequence
  Synthetic Construct
gggcggcuguccccaggccu

SEQ ID NO: 1516 - RNA, 20 nt, Artificial Sequence
  Synthetic Construct
agggcggcuguccccaggcc

SEQ ID NO: 1517 - RNA, 20 nt, Artificial Sequence
  Synthetic Construct
cagggcggcuguccccaggc

SEQ ID NO: 1518 - RNA, 20 nt, Artificial Sequence
  Synthetic Construct
gcagggcggcuguccccagg

SEQ ID NO: 1519 - RNA, 20 nt, Artificial Sequence
  Synthetic Construct
agcagggcggcuguccccag

SEQ ID NO: 1520 - RNA, 20 nt, Artificial Sequence
  Synthetic Construct
gagcagggcggcugucccca

SEQ ID NO: 1521 - RNA, 20 nt, Artificial Sequence
  Synthetic Construct
ugagcagggcggcugucccc

SEQ ID NO: 1522 - RNA, 20 nt, Artificial Sequence
  Synthetic Construct
augagcagggcggcuguccc

SEQ ID NO: 1523 - RNA, 20 nt, Artificial Sequence
  Synthetic Construct
aaugagcagggcggcugucc

SEQ ID NO: 1524 - RNA, 20 nt, Artificial Sequence
  Synthetic Construct
caaugagcagggcggcuguc

SEQ ID NO: 1525 - RNA, 20 nt, Artificial Sequence
  Synthetic Construct
ccaaugagcagggcggcugu

SEQ ID NO: 1526 - RNA, 20 nt, Artificial Sequence
  Synthetic Construct
cccaaugagcagggcggcug

SEQ ID NO: 1527 - RNA, 20 nt, Artificial Sequence
  Synthetic Construct
ccccaaugagcagggcggcu

SEQ ID NO: 1528 - RNA, 20 nt, Artificial Sequence
  Synthetic Construct
accccaaugagcagggcggc

SEQ ID NO: 1529 - RNA, 20 nt, Artificial Sequence
  Synthetic Construct
gaccccaaugagcagggcgg

SEQ ID NO: 1530 - RNA, 20 nt, Artificial Sequence
  Synthetic Construct
ugaccccaaugagcagggcg

SEQ ID NO: 1531 - RNA, 20 nt, Artificial Sequence
  Synthetic Construct
augaccccaaugagcagggc

SEQ ID NO: 1532 - RNA, 20 nt, Artificial Sequence
  Synthetic Construct
gaugaccccaaugagcaggg

SEQ ID NO: 1533 - RNA, 20 nt, Artificial Sequence
  Synthetic Construct
agaugaccccaaugagcagg

SEQ ID NO: 1534 - RNA, 20 nt, Artificial Sequence
  Synthetic Construct
aagaugaccccaaugagcag

SEQ ID NO: 1535 - RNA, 20 nt, Artificial Sequence
  Synthetic Construct
caagaugaccccaaugagca

SEQ ID NO: 1536 - RNA, 20 nt, Artificial Sequence
  Synthetic Construct
acaagaugaccccaaugagc

SEQ ID NO: 1537 - RNA, 20 nt, Artificial Sequence
  Synthetic Construct
cacaagaugaccccaaugag

SEQ ID NO: 1538 - RNA, 20 nt, Artificial Sequence
  Synthetic Construct
ccacaagaugaccccaauga

SEQ ID NO: 1539 - RNA, 20 nt, Artificial Sequence
  Synthetic Construct
gccacaagaugaccccaaug

SEQ ID NO: 1540 - RNA, 20 nt, Artificial Sequence
  Synthetic Construct
ugccacaagaugaccccaau

SEQ ID NO: 1541 - RNA, 20 nt, Artificial Sequence
  Synthetic Construct
uugccacaagaugaccccaa

SEQ ID NO: 1542 - RNA, 20 nt, Artificial Sequence
  Synthetic Construct
uuugccacaagaugacccca

SEQ ID NO: 1543 - RNA, 20 nt, Artificial Sequence
  Synthetic Construct
cuuugccacaagaugacccc

SEQ ID NO: 1544 - RNA, 20 nt, Artificial Sequence
  Synthetic Construct
ccuuugccacaagaugaccc

SEQ ID NO: 1545 - RNA, 20 nt, Artificial Sequence
  Synthetic Construct
gccuuugccacaagaugacc

SEQ ID NO: 1546 - RNA, 20 nt, Artificial Sequence
  Synthetic Construct
cgccuuugccacaagaugac

SEQ ID NO: 1547 - RNA, 20 nt, Artificial Sequence
  Synthetic Construct
ccgccuuugccacaagauga

SEQ ID NO: 1548 - RNA, 20 nt, Artificial Sequence
  Synthetic Construct
gccgccuuugccacaagaug

SEQ ID NO: 1549 - RNA, 20 nt, Artificial Sequence
  Synthetic Construct
ugccgccuuugccacaagau

SEQ ID NO: 1550 - RNA, 20 nt, Artificial Sequence
  Synthetic Construct
uugccgccuuugccacaaga

SEQ ID NO: 1551 - RNA, 20 nt, Artificial Sequence
  Synthetic Construct
guugccgccuuugccacaag

SEQ ID NO: 1552 - RNA, 20 nt, Artificial Sequence
  Synthetic Construct
cguugccgccuuugccacaa

SEQ ID NO: 1553 - RNA, 20 nt, Artificial Sequence
  Synthetic Construct
gcguugccgccuuugccaca

SEQ ID NO: 1554 - RNA, 20 nt, Artificial Sequence
  Synthetic Construct
ggcguugccgccuuugccac

SEQ ID NO: 1555 - RNA, 20 nt, Artificial Sequence
  Synthetic Construct
cggcguugccgccuuugcca

SEQ ID NO: 1556 - RNA, 20 nt, Artificial Sequence
  Synthetic Construct
ucggcguugccgccuuugcc

SEQ ID NO: 1557 - RNA, 20 nt, Artificial Sequence
  Synthetic Construct
cucggcguugccgccuuugc

SEQ ID NO: 1558 - RNA, 20 nt, Artificial Sequence
  Synthetic Construct
ccucggcguugccgccuuug

SEQ ID NO: 1559 - RNA, 20 nt, Artificial Sequence
  Synthetic Construct
uccucggcguugccgccuuu

SEQ ID NO: 1560 - RNA, 20 nt, Artificial Sequence
  Synthetic Construct
cuccucggcguugccgccuu

SEQ ID NO: 1561 - RNA, 20 nt, Artificial Sequence
  Synthetic Construct
ucuccucggcguugccgccu

SEQ ID NO: 1562 - RNA, 20 nt, Artificial Sequence
  Synthetic Construct
cucuccucggcguugccgcc

SEQ ID NO: 1563 - RNA, 20 nt, Artificial Sequence
  Synthetic Construct
ccucuccucggcguugccgc

SEQ ID NO: 1564 - RNA, 20 nt, Artificial Sequence
  Synthetic Construct
uccucuccucggcguugccg

SEQ ID NO: 1565 - RNA, 20 nt, Artificial Sequence
  Synthetic Construct
cuccucuccucggcguugcc

SEQ ID NO: 1566 - RNA, 20 nt, Artificial Sequence
  Synthetic Construct
ucuccucuccucggcguugc

SEQ ID NO: 1567 - RNA, 20 nt, Artificial Sequence
  Synthetic Construct
cucuccucuccucggcguug

SEQ ID NO: 1568 - RNA, 19 nt, Artificial Sequence
  Synthetic Construct
ggccccuccucgccugguu

SEQ ID NO: 1569 - RNA, 19 nt, Artificial Sequence
  Synthetic Construct
uggccccuccucgccuggu

SEQ ID NO: 1570 - RNA, 19 nt, Artificial Sequence
  Synthetic Construct
uuggccccuccucgccugg

SEQ ID NO: 1571 - RNA, 19 nt, Artificial Sequence
  Synthetic Construct
guuggccccuccucgccug

SEQ ID NO: 1572 - RNA, 19 nt, Artificial Sequence
  Synthetic Construct
aguuggccccuccucgccu

SEQ ID NO: 1573 - RNA, 19 nt, Artificial Sequence
  Synthetic Construct
caguuggccccuccucgcc

SEQ ID NO: 1574 - RNA, 19 nt, Artificial Sequence
  Synthetic Construct
gcaguuggccccuccucgc

SEQ ID NO: 1575 - RNA, 19 nt, Artificial Sequence
  Synthetic Construct
ugcaguuggccccuccucg

SEQ ID NO: 1576 - RNA, 19 nt, Artificial Sequence
  Synthetic Construct
cugcaguuggccccuccuc

SEQ ID NO: 1577 - RNA, 19 nt, Artificial Sequence
  Synthetic Construct
ccugcaguuggccccuccu

SEQ ID NO: 1578 - RNA, 19 nt, Artificial Sequence
  Synthetic Construct
accugcaguuggccccucc

SEQ ID NO: 1579 - RNA, 19 nt, Artificial Sequence
  Synthetic Construct
caccugcaguuggccccuc

SEQ ID NO: 1580 - RNA, 19 nt, Artificial Sequence
  Synthetic Construct
ucaccugcaguuggccccu

SEQ ID NO: 1581 - RNA, 19 nt, Artificial Sequence
  Synthetic Construct
cucaccugcaguuggcccc

SEQ ID NO: 1582 - RNA, 19 nt, Artificial Sequence
  Synthetic Construct
ccucaccugcaguuggccc

SEQ ID NO: 1583 - RNA, 19 nt, Artificial Sequence
  Synthetic Construct
cccucaccugcaguuggcc

SEQ ID NO: 1584 - RNA, 19 nt, Artificial Sequence
  Synthetic Construct
ccccucaccugcaguuggc

SEQ ID NO: 1585 - RNA, 19 nt, Artificial Sequence
  Synthetic Construct
accccucaccugcaguugg

SEQ ID NO: 1586 - RNA, 19 nt, Artificial Sequence
  Synthetic Construct
aaccccucaccugcaguug

SEQ ID NO: 1587 - RNA, 19 nt, Artificial Sequence
  Synthetic Construct
aaaccccucaccugcaguu

SEQ ID NO: 1588 - RNA, 19 nt, Artificial Sequence
  Synthetic Construct
caaaccccucaccugcagu

SEQ ID NO: 1589 - RNA, 19 nt, Artificial Sequence
  Synthetic Construct
ucaaaccccucaccugcag

SEQ ID NO: 1590 - RNA, 19 nt, Artificial Sequence
  Synthetic Construct
aucaaaccccucaccugca

SEQ ID NO: 1591 - RNA, 19 nt, Artificial Sequence
  Synthetic Construct
uaucaaaccccucaccugc

SEQ ID NO: 1592 - RNA, 19 nt, Artificial Sequence
  Synthetic Construct
uuaucaaaccccucaccug

SEQ ID NO: 1593 - RNA, 19 nt, Artificial Sequence
  Synthetic Construct
uuuaucaaaccccucaccu

SEQ ID NO: 1594 - RNA, 19 nt, Artificial Sequence
  Synthetic Construct
cuuuaucaaaccccucacc

SEQ ID NO: 1595 - RNA, 19 nt, Artificial Sequence
  Synthetic Construct
acuuuaucaaaccccucac

SEQ ID NO: 1596 - RNA, 19 nt, Artificial Sequence
  Synthetic Construct
gacuuuaucaaaccccuca

SEQ ID NO: 1597 - RNA, 19 nt, Artificial Sequence
  Synthetic Construct
ugacuuuaucaaaccccuc

SEQ ID NO: 1598 - RNA, 19 nt, Artificial Sequence
  Synthetic Construct
cugacuuuaucaaaccccu

SEQ ID NO: 1599 - RNA, 19 nt, Artificial Sequence
  Synthetic Construct
ccugacuuuaucaaacccc

SEQ ID NO: 1600 - RNA, 19 nt, Artificial Sequence
  Synthetic Construct
cccugacuuuaucaaaccc

SEQ ID NO: 1601 - RNA, 19 nt, Artificial Sequence
  Synthetic Construct
ucccugacuuuaucaaacc

SEQ ID NO: 1602 - RNA, 19 nt, Artificial Sequence
  Synthetic Construct
uucccugacuuuaucaaac

SEQ ID NO: 1603 - RNA, 19 nt, Artificial Sequence
  Synthetic Construct
cuucccugacuuuaucaaa

SEQ ID NO: 1604 - RNA, 19 nt, Artificial Sequence
  Synthetic Construct
gcuucccugacuuuaucaa

SEQ ID NO: 1605 - RNA, 19 nt, Artificial Sequence
  Synthetic Construct
ugcuucccugacuuuauca

SEQ ID NO: 1606 - RNA, 19 nt, Artificial Sequence
  Synthetic Construct
cugcuucccugacuuuauc

SEQ ID NO: 1607 - RNA, 19 nt, Artificial Sequence
  Synthetic Construct
ucugcuucccugacuuuau

SEQ ID NO: 1608 - RNA, 19 nt, Artificial Sequence
  Synthetic Construct
uucugcuucccugacuuua

SEQ ID NO: 1609 - RNA, 19 nt, Artificial Sequence
  Synthetic Construct
cuucugcuucccugacuuu

SEQ ID NO: 1610 - RNA, 19 nt, Artificial Sequence
  Synthetic Construct
ucuucugcuucccugacuu

SEQ ID NO: 1611 - RNA, 19 nt, Artificial Sequence
  Synthetic Construct
aucuucugcuucccugacu

SEQ ID NO: 1612 - RNA, 19 nt, Artificial Sequence
  Synthetic Construct
uaucuucugcuucccugac

SEQ ID NO: 1613 - RNA, 19 nt, Artificial Sequence
  Synthetic Construct
cuaucuucugcuucccuga

SEQ ID NO: 1614 - RNA, 19 nt, Artificial Sequence
  Synthetic Construct
gcuaucuucugcuucccug

SEQ ID NO: 1615 - RNA, 19 nt, Artificial Sequence
  Synthetic Construct
ggcuaucuucugcuucccu

SEQ ID NO: 1616 - RNA, 19 nt, Artificial Sequence
  Synthetic Construct
gggcuaucuucugcuuccc

SEQ ID NO: 1617 - RNA, 19 nt, Artificial Sequence
  Synthetic Construct
ggggcuaucuucugcuucc

SEQ ID NO: 1618 - RNA, 19 nt, Artificial Sequence
  Synthetic Construct
gggggcuaucuucugcuuc

SEQ ID NO: 1619 - RNA, 19 nt, Artificial Sequence
  Synthetic Construct
ugggggcuaucuucugcuu

SEQ ID NO: 1620 - RNA, 19 nt, Artificial Sequence
  Synthetic Construct
uugggggcuaucuucugcu

SEQ ID NO: 1621 - RNA, 19 nt, Artificial Sequence
  Synthetic Construct
guugggggcuaucuucugc

SEQ ID NO: 1622 - RNA, 19 nt, Artificial Sequence
  Synthetic Construct
uguugggggcuaucuucug

SEQ ID NO: 1623 - RNA, 19 nt, Artificial Sequence
  Synthetic Construct
guguugggggcuaucuucu

SEQ ID NO: 1624 - RNA, 19 nt, Artificial Sequence
  Synthetic Construct
uguguugggggcuaucuuc

SEQ ID NO: 1625 - RNA, 19 nt, Artificial Sequence
  Synthetic Construct
auguguugggggcuaucuu

SEQ ID NO: 1626 - RNA, 19 nt, Artificial Sequence
  Synthetic Construct
cauguguugggggcuaucu

SEQ ID NO: 1627 - RNA, 19 nt, Artificial Sequence
  Synthetic Construct
acauguguugggggcuauc

SEQ ID NO: 1628 - RNA, 19 nt, Artificial Sequence
  Synthetic Construct
cacauguguugggggcuau

SEQ ID NO: 1629 - RNA, 19 nt, Artificial Sequence
  Synthetic Construct
ucacauguguugggggcua

SEQ ID NO: 1630 - RNA, 19 nt, Artificial Sequence
  Synthetic Construct
gucacauguguugggggcu

SEQ ID NO: 1631 - RNA, 19 nt, Artificial Sequence
  Synthetic Construct
agucacauguguugggggc

SEQ ID NO: 1632 - RNA, 19 nt, Artificial Sequence
  Synthetic Construct
cagucacauguguuggggg

SEQ ID NO: 1633 - RNA, 19 nt, Artificial Sequence
  Synthetic Construct
ccagucacauguguugggg

SEQ ID NO: 1634 - RNA, 19 nt, Artificial Sequence
  Synthetic Construct
cccagucacauguguuggg

SEQ ID NO: 1635 - RNA, 19 nt, Artificial Sequence
  Synthetic Construct
ccccagucacauguguugg

SEQ ID NO: 1636 - RNA, 19 nt, Artificial Sequence
  Synthetic Construct
cccccagucacauguguug

SEQ ID NO: 1637 - RNA, 19 nt, Artificial Sequence
  Synthetic Construct
ccccccagucacauguguu

SEQ ID NO: 1638 - RNA, 19 nt, Artificial Sequence
  Synthetic Construct
uccccccagucacaugugu

SEQ ID NO: 1639 - RNA, 19 nt, Artificial Sequence
  Synthetic Construct
auccccccagucacaugug

SEQ ID NO: 1640 - RNA, 19 nt, Artificial Sequence
  Synthetic Construct
cauccccccagucacaugu

SEQ ID NO: 1641 - RNA, 19 nt, Artificial Sequence
  Synthetic Construct
ccauccccccagucacaug

SEQ ID NO: 1642 - RNA, 19 nt, Artificial Sequence
  Synthetic Construct
accauccccccagucacau

SEQ ID NO: 1643 - RNA, 19 nt, Artificial Sequence
  Synthetic Construct
gaccauccccccagucaca

SEQ ID NO: 1644 - RNA, 19 nt, Artificial Sequence
  Synthetic Construct
ugaccauccccccagucac

SEQ ID NO: 1645 - RNA, 19 nt, Artificial Sequence
  Synthetic Construct
uugaccauccccccaguca

SEQ ID NO: 1646 - RNA, 19 nt, Artificial Sequence
  Synthetic Construct
guugaccauccccccaguc

SEQ ID NO: 1647 - RNA, 19 nt, Artificial Sequence
  Synthetic Construct
uguugaccauccccccagu

SEQ ID NO: 1648 - RNA, 19 nt, Artificial Sequence
  Synthetic Construct
uuguugaccauccccccag

SEQ ID NO: 1649 - RNA, 19 nt, Artificial Sequence
  Synthetic Construct
cuuguugaccaucccccca

SEQ ID NO: 1650 - RNA, 19 nt, Artificial Sequence
  Synthetic Construct
ucuuguugaccaucccccc

SEQ ID NO: 1651 - RNA, 19 nt, Artificial Sequence
  Synthetic Construct
uucuuguugaccauccccc

SEQ ID NO: 1652 - RNA, 19 nt, Artificial Sequence
  Synthetic Construct
uuucuuguugaccaucccc

SEQ ID NO: 1653 - RNA, 19 nt, Artificial Sequence
  Synthetic Construct
cuuucuuguugaccauccc

SEQ ID NO: 1654 - RNA, 19 nt, Artificial Sequence
  Synthetic Construct
ccuuucuuguugaccaucc

SEQ ID NO: 1655 - RNA, 19 nt, Artificial Sequence
  Synthetic Construct
uccuuucuuguugaccauc

SEQ ID NO: 1656 - RNA, 19 nt, Artificial Sequence
  Synthetic Construct
uuccuuucuuguugaccau

SEQ ID NO: 1657 - RNA, 19 nt, Artificial Sequence
  Synthetic Construct
auuccuuucuuguugacca

SEQ ID NO: 1658 - RNA, 19 nt, Artificial Sequence
  Synthetic Construct
cauuccuuucuuguugacc

SEQ ID NO: 1659 - RNA, 19 nt, Artificial Sequence
  Synthetic Construct
ccauuccuuucuuguugac

SEQ ID NO: 1660 - RNA, 19 nt, Artificial Sequence
  Synthetic Construct
accauuccuuucuuguuga

SEQ ID NO: 1661 - RNA, 19 nt, Artificial Sequence
  Synthetic Construct
caccauuccuuucuuguug

SEQ ID NO: 1662 - RNA, 19 nt, Artificial Sequence
  Synthetic Construct
ucaccauuccuuucuuguu

SEQ ID NO: 1663 - RNA, 19 nt, Artificial Sequence
  Synthetic Construct
cucaccauuccuuucuugu

SEQ ID NO: 1664 - RNA, 19 nt, Artificial Sequence
  Synthetic Construct
acucaccauuccuuucuug

SEQ ID NO: 1665 - RNA, 19 nt, Artificial Sequence
  Synthetic Construct
cacucaccauuccuuucuu

SEQ ID NO: 1666 - RNA, 19 nt, Artificial Sequence
  Synthetic Construct
ccacucaccauuccuuucu

SEQ ID NO: 1667 - RNA, 19 nt, Artificial Sequence
  Synthetic Construct
accacucaccauuccuuuc

SEQ ID NO: 1668 - RNA, 19 nt, Artificial Sequence
  Synthetic Construct
caccacucaccauuccuuu

SEQ ID NO: 1669 - RNA, 19 nt, Artificial Sequence
  Synthetic Construct
ccaccacucaccauuccuu

SEQ ID NO: 1670 - RNA, 19 nt, Artificial Sequence
  Synthetic Construct
accaccacucaccauuccu

SEQ ID NO: 1671 - RNA, 19 nt, Artificial Sequence
  Synthetic Construct
caccaccacucaccauucc

SEQ ID NO: 1672 - RNA, 19 nt, Artificial Sequence
  Synthetic Construct
ccaccaccacucaccauuc

SEQ ID NO: 1673 - RNA, 19 nt, Artificial Sequence
  Synthetic Construct
gccaccaccacucaccauu

SEQ ID NO: 1674 - RNA, 19 nt, Artificial Sequence
  Synthetic Construct
agccaccaccacucaccau

SEQ ID NO: 1675 - RNA, 19 nt, Artificial Sequence
  Synthetic Construct
cagccaccaccacucacca

SEQ ID NO: 1676 - RNA, 19 nt, Artificial Sequence
  Synthetic Construct
acagccaccaccacucacc

SEQ ID NO: 1677 - RNA, 19 nt, Artificial Sequence
  Synthetic Construct
cacagccaccaccacucac

SEQ ID NO: 1678 - RNA, 19 nt, Artificial Sequence
  Synthetic Construct
gcacagccaccaccacuca

SEQ ID NO: 1679 - RNA, 19 nt, Artificial Sequence
  Synthetic Construct
agcacagccaccaccacuc

SEQ ID NO: 1680 - RNA, 19 nt, Artificial Sequence
  Synthetic Construct
gagcacagccaccaccacu

SEQ ID NO: 1681 - RNA, 19 nt, Artificial Sequence
  Synthetic Construct
agagcacagccaccaccac

SEQ ID NO: 1682 - RNA, 19 nt, Artificial Sequence
  Synthetic Construct
gagagcacagccaccacca

SEQ ID NO: 1683 - RNA, 19 nt, Artificial Sequence
  Synthetic Construct
ugagagcacagccaccacc

SEQ ID NO: 1684 - RNA, 19 nt, Artificial Sequence
  Synthetic Construct
uugagagcacagccaccac

SEQ ID NO: 1685 - RNA, 19 nt, Artificial Sequence
  Synthetic Construct
auugagagcacagccacca

SEQ ID NO: 1686 - RNA, 19 nt, Artificial Sequence
  Synthetic Construct
aauugagagcacagccacc

SEQ ID NO: 1687 - RNA, 19 nt, Artificial Sequence
  Synthetic Construct
aaauugagagcacagccac

SEQ ID NO: 1688 - RNA, 19 nt, Artificial Sequence
  Synthetic Construct
aaaauugagagcacagcca

SEQ ID NO: 1689 - RNA, 19 nt, Artificial Sequence
  Synthetic Construct
gaaaauugagagcacagcc

SEQ ID NO: 1690 - RNA, 19 nt, Artificial Sequence
  Synthetic Construct
ggaaaauugagagcacagc

SEQ ID NO: 1691 - RNA, 19 nt, Artificial Sequence
  Synthetic Construct
gggaaaauugagagcacag

SEQ ID NO: 1692 - RNA, 19 nt, Artificial Sequence
  Synthetic Construct
agggaaaauugagagcaca

SEQ ID NO: 1693 - RNA, 19 nt, Artificial Sequence
  Synthetic Construct
cagggaaaauugagagcac

SEQ ID NO: 1694 - RNA, 19 nt, Artificial Sequence
  Synthetic Construct
acagggaaaauugagagca

SEQ ID NO: 1695 - RNA, 19 nt, Artificial Sequence
  Synthetic Construct
gacagggaaaauugagagc

SEQ ID NO: 1696 - RNA, 19 nt, Artificial Sequence
  Synthetic Construct
agacagggaaaauugagag

SEQ ID NO: 1697 - RNA, 19 nt, Artificial Sequence
  Synthetic Construct
gagacagggaaaauugaga

SEQ ID NO: 1698 - RNA, 19 nt, Artificial Sequence
  Synthetic Construct
ggagacagggaaaauugag

SEQ ID NO: 1699 - RNA, 19 nt, Artificial Sequence
  Synthetic Construct
cggagacagggaaaauuga

SEQ ID NO: 1700 - RNA, 19 nt, Artificial Sequence
  Synthetic Construct
acggagacagggaaaauug

SEQ ID NO: 1701 - RNA, 19 nt, Artificial Sequence
  Synthetic Construct
uacggagacagggaaaauu

SEQ ID NO: 1702 - RNA, 19 nt, Artificial Sequence
  Synthetic Construct
guacggagacagggaaaau

SEQ ID NO: 1703 - RNA, 19 nt, Artificial Sequence
  Synthetic Construct
uguacggagacagggaaaa

SEQ ID NO: 1704 - RNA, 19 nt, Artificial Sequence
  Synthetic Construct
cuguacggagacagggaaa

SEQ ID NO: 1705 - RNA, 19 nt, Artificial Sequence
  Synthetic Construct
ccuguacggagacagggaa

SEQ ID NO: 1706 - RNA, 19 nt, Artificial Sequence
  Synthetic Construct
gccuguacggagacaggga

SEQ ID NO: 1707 - RNA, 19 nt, Artificial Sequence
  Synthetic Construct
agccuguacggagacaggg

SEQ ID NO: 1708 - RNA, 19 nt, Artificial Sequence
  Synthetic Construct
gagccuguacggagacagg

SEQ ID NO: 1709 - RNA, 19 nt, Artificial Sequence
  Synthetic Construct
agagccuguacggagacag

SEQ ID NO: 1710 - RNA, 19 nt, Artificial Sequence
  Synthetic Construct
cagagccuguacggagaca

SEQ ID NO: 1711 - RNA, 19 nt, Artificial Sequence
  Synthetic Construct
acagagccuguacggagac

SEQ ID NO: 1712 - RNA, 19 nt, Artificial Sequence
  Synthetic Construct
cacagagccuguacggaga

SEQ ID NO: 1713 - RNA, 19 nt, Artificial Sequence
  Synthetic Construct
ccacagagccuguacggag

SEQ ID NO: 1714 - RNA, 19 nt, Artificial Sequence
  Synthetic Construct
cccacagagccuguacgga

SEQ ID NO: 1715 - RNA, 19 nt, Artificial Sequence
  Synthetic Construct
ucccacagagccuguacgg

SEQ ID NO: 1716 - RNA, 19 nt, Artificial Sequence
  Synthetic Construct
cucccacagagccuguacg

SEQ ID NO: 1717 - RNA, 19 nt, Artificial Sequence
  Synthetic Construct
ccucccacagagccuguac

SEQ ID NO: 1718 - RNA, 19 nt, Artificial Sequence
  Synthetic Construct
uccucccacagagccugua

SEQ ID NO: 1719 - RNA, 19 nt, Artificial Sequence
  Synthetic Construct
auccucccacagagccugu

SEQ ID NO: 1720 - RNA, 19 nt, Artificial Sequence
  Synthetic Construct
gauccucccacagagccug

SEQ ID NO: 1721 - RNA, 19 nt, Artificial Sequence
  Synthetic Construct
ugauccucccacagagccu

SEQ ID NO: 1722 - RNA, 19 nt, Artificial Sequence
  Synthetic Construct
cugauccucccacagagcc

SEQ ID NO: 1723 - RNA, 19 nt, Artificial Sequence
  Synthetic Construct
ccugauccucccacagagc

SEQ ID NO: 1724 - RNA, 19 nt, Artificial Sequence
  Synthetic Construct
cccugauccucccacagag

SEQ ID NO: 1725 - RNA, 19 nt, Artificial Sequence
  Synthetic Construct
gcccugauccucccacaga

SEQ ID NO: 1726 - RNA, 19 nt, Artificial Sequence
  Synthetic Construct
agcccugauccucccacag

SEQ ID NO: 1727 - RNA, 19 nt, Artificial Sequence
  Synthetic Construct
cagcccugauccucccaca

SEQ ID NO: 1728 - RNA, 19 nt, Artificial Sequence
  Synthetic Construct
ccagcccugauccucccac

SEQ ID NO: 1729 - RNA, 19 nt, Artificial Sequence
  Synthetic Construct
cccagcccugauccuccca

SEQ ID NO: 1730 - RNA, 19 nt, Artificial Sequence
  Synthetic Construct
ucccagcccugauccuccc

SEQ ID NO: 1731 - RNA, 19 nt, Artificial Sequence
  Synthetic Construct
uucccagcccugauccucc

SEQ ID NO: 1732 - RNA, 19 nt, Artificial Sequence
  Synthetic Construct
guucccagcccugauccuc

SEQ ID NO: 1733 - RNA, 19 nt, Artificial Sequence
  Synthetic Construct
aguucccagcccugauccu

SEQ ID NO: 1734 - RNA, 19 nt, Artificial Sequence
  Synthetic Construct
gaguucccagcccugaucc

SEQ ID NO: 1735 - RNA, 19 nt, Artificial Sequence
  Synthetic Construct
agaguucccagcccugauc

SEQ ID NO: 1736 - RNA, 19 nt, Artificial Sequence
  Synthetic Construct
uagaguucccagcccugau

SEQ ID NO: 1737 - RNA, 19 nt, Artificial Sequence
  Synthetic Construct
cuagaguucccagcccuga

SEQ ID NO: 1738 - RNA, 19 nt, Artificial Sequence
  Synthetic Construct
gcuagaguucccagcccug

SEQ ID NO: 1739 - RNA, 19 nt, Artificial Sequence
  Synthetic Construct
ggcuagaguucccagcccu

SEQ ID NO: 1740 - RNA, 19 nt, Artificial Sequence
  Synthetic Construct
gggcuagaguucccagccc

SEQ ID NO: 1741 - RNA, 19 nt, Artificial Sequence
  Synthetic Construct
agggcuagaguucccagcc

SEQ ID NO: 1742 - RNA, 19 nt, Artificial Sequence
  Synthetic Construct
cagggcuagaguucccagc

SEQ ID NO: 1743 - RNA, 19 nt, Artificial Sequence
  Synthetic Construct
ccagggcuagaguucccag

SEQ ID NO: 1744 - RNA, 19 nt, Artificial Sequence
  Synthetic Construct
gccagggcuagaguuccca

SEQ ID NO: 1745 - RNA, 19 nt, Artificial Sequence
  Synthetic Construct
ggccagggcuagaguuccc

SEQ ID NO: 1746 - RNA, 19 nt, Artificial Sequence
  Synthetic Construct
gggccagggcuagaguucc

SEQ ID NO: 1747 - RNA, 19 nt, Artificial Sequence
  Synthetic Construct
agggccagggcuagaguuc

SEQ ID NO: 1748 - RNA, 19 nt, Artificial Sequence
  Synthetic Construct
cagggccagggcuagaguu

SEQ ID NO: 1749 - RNA, 19 nt, Artificial Sequence
  Synthetic Construct
ccagggccagggcuagagu

SEQ ID NO: 1750 - RNA, 19 nt, Artificial Sequence
  Synthetic Construct
cccagggccagggcuagag

SEQ ID NO: 1751 - RNA, 19 nt, Artificial Sequence
  Synthetic Construct
ccccagggccagggcuaga

SEQ ID NO: 1752 - RNA, 19 nt, Artificial Sequence
  Synthetic Construct
uccccagggccagggcuag

SEQ ID NO: 1753 - RNA, 19 nt, Artificial Sequence
  Synthetic Construct
auccccagggccagggcua

SEQ ID NO: 1754 - RNA, 19 nt, Artificial Sequence
  Synthetic Construct
gauccccagggccagggcu

SEQ ID NO: 1755 - RNA, 19 nt, Artificial Sequence
  Synthetic Construct
ggauccccagggccagggc

SEQ ID NO: 1756 - RNA, 19 nt, Artificial Sequence
  Synthetic Construct
aggauccccagggccaggg

SEQ ID NO: 1757 - RNA, 19 nt, Artificial Sequence
  Synthetic Construct
caggauccccagggccagg

SEQ ID NO: 1758 - RNA, 19 nt, Artificial Sequence
  Synthetic Construct
ccaggauccccagggccag

SEQ ID NO: 1759 - RNA, 19 nt, Artificial Sequence
  Synthetic Construct
cccaggauccccagggcca

SEQ ID NO: 1760 - RNA, 19 nt, Artificial Sequence
  Synthetic Construct
ucccaggauccccagggcc

SEQ ID NO: 1761 - RNA, 19 nt, Artificial Sequence
  Synthetic Construct
cucccaggauccccagggc

SEQ ID NO: 1762 - RNA, 19 nt, Artificial Sequence
  Synthetic Construct
ccucccaggauccccaggg

SEQ ID NO: 1763 - RNA, 19 nt, Artificial Sequence
  Synthetic Construct
gccucccaggauccccagg

SEQ ID NO: 1764 - RNA, 19 nt, Artificial Sequence
  Synthetic Construct
ggccucccaggauccccag

SEQ ID NO: 1765 - RNA, 19 nt, Artificial Sequence
  Synthetic Construct
aggccucccaggaucccca

SEQ ID NO: 1766 - RNA, 19 nt, Artificial Sequence
  Synthetic Construct
caggccucccaggaucccc

SEQ ID NO: 1767 - RNA, 19 nt, Artificial Sequence
  Synthetic Construct
ccaggccucccaggauccc

SEQ ID NO: 1768 - RNA, 19 nt, Artificial Sequence
  Synthetic Construct
cccaggccucccaggaucc

SEQ ID NO: 1769 - RNA, 19 nt, Artificial Sequence
  Synthetic Construct
ccccaggccucccaggauc

SEQ ID NO: 1770 - RNA, 19 nt, Artificial Sequence
  Synthetic Construct
uccccaggccucccaggau

SEQ ID NO: 1771 - RNA, 19 nt, Artificial Sequence
  Synthetic Construct
guccccaggccucccagga

SEQ ID NO: 1772 - RNA, 19 nt, Artificial Sequence
  Synthetic Construct
uguccccaggccucccagg

SEQ ID NO: 1773 - RNA, 19 nt, Artificial Sequence
  Synthetic Construct
cuguccccaggccucccag

SEQ ID NO: 1774 - RNA, 19 nt, Artificial Sequence
  Synthetic Construct
gcuguccccaggccuccca

SEQ ID NO: 1775 - RNA, 19 nt, Artificial Sequence
  Synthetic Construct
ggcuguccccaggccuccc

SEQ ID NO: 1776 - RNA, 19 nt, Artificial Sequence
  Synthetic Construct
cggcuguccccaggccucc

SEQ ID NO: 1777 - RNA, 19 nt, Artificial Sequence
  Synthetic Construct
gcggcuguccccaggccuc

SEQ ID NO: 1778 - RNA, 19 nt, Artificial Sequence
  Synthetic Construct
ggcggcuguccccaggccu

SEQ ID NO: 1779 - RNA, 19 nt, Artificial Sequence
  Synthetic Construct
gggcggcuguccccaggcc

SEQ ID NO: 1780 - RNA, 19 nt, Artificial Sequence
  Synthetic Construct
agggcggcuguccccaggc

SEQ ID NO: 1781 - RNA, 19 nt, Artificial Sequence
  Synthetic Construct
cagggcggcuguccccagg

SEQ ID NO: 1782 - RNA, 19 nt, Artificial Sequence
  Synthetic Construct
gcagggcggcuguccccag

SEQ ID NO: 1783 - RNA, 19 nt, Artificial Sequence
  Synthetic Construct
agcagggcggcugucccca

SEQ ID NO: 1784 - RNA, 19 nt, Artificial Sequence
  Synthetic Construct
gagcagggcggcugucccc

SEQ ID NO: 1785 - RNA, 19 nt, Artificial Sequence
  Synthetic Construct
ugagcagggcggcuguccc

SEQ ID NO: 1786 - RNA, 19 nt, Artificial Sequence
  Synthetic Construct
augagcagggcggcugucc

SEQ ID NO: 1787 - RNA, 19 nt, Artificial Sequence
  Synthetic Construct
aaugagcagggcggcuguc

SEQ ID NO: 1788 - RNA, 19 nt, Artificial Sequence
  Synthetic Construct
caaugagcagggcggcugu

SEQ ID NO: 1789 - RNA, 19 nt, Artificial Sequence
  Synthetic Construct
ccaaugagcagggcggcug

SEQ ID NO: 1790 - RNA, 19 nt, Artificial Sequence
  Synthetic Construct
cccaaugagcagggcggcu

SEQ ID NO: 1791 - RNA, 19 nt, Artificial Sequence
  Synthetic Construct
ccccaaugagcagggcggc

SEQ ID NO: 1792 - RNA, 19 nt, Artificial Sequence
  Synthetic Construct
accccaaugagcagggcgg

SEQ ID NO: 1793 - RNA, 19 nt, Artificial Sequence
  Synthetic Construct
gaccccaaugagcagggcg

SEQ ID NO: 1794 - RNA, 19 nt, Artificial Sequence
  Synthetic Construct
ugaccccaaugagcagggc

SEQ ID NO: 1795 - RNA, 19 nt, Artificial Sequence
  Synthetic Construct
augaccccaaugagcaggg

SEQ ID NO: 1796 - RNA, 19 nt, Artificial Sequence
  Synthetic Construct
gaugaccccaaugagcagg

SEQ ID NO: 1797 - RNA, 19 nt, Artificial Sequence
  Synthetic Construct
agaugaccccaaugagcag

SEQ ID NO: 1798 - RNA, 19 nt, Artificial Sequence
  Synthetic Construct
aagaugaccccaaugagca

SEQ ID NO: 1799 - RNA, 19 nt, Artificial Sequence
  Synthetic Construct
caagaugaccccaaugagc

SEQ ID NO: 1800 - RNA, 19 nt, Artificial Sequence
  Synthetic Construct
acaagaugaccccaaugag

SEQ ID NO: 1801 - RNA, 19 nt, Artificial Sequence
  Synthetic Construct
cacaagaugaccccaauga

SEQ ID NO: 1802 - RNA, 19 nt, Artificial Sequence
  Synthetic Construct
ccacaagaugaccccaaug

SEQ ID NO: 1803 - RNA, 19 nt, Artificial Sequence
  Synthetic Construct
gccacaagaugaccccaau

SEQ ID NO: 1804 - RNA, 19 nt, Artificial Sequence
  Synthetic Construct
ugccacaagaugaccccaa

SEQ ID NO: 1805 - RNA, 19 nt, Artificial Sequence
  Synthetic Construct
uugccacaagaugacccca

SEQ ID NO: 1806 - RNA, 19 nt, Artificial Sequence
  Synthetic Construct
uuugccacaagaugacccc

SEQ ID NO: 1807 - RNA, 19 nt, Artificial Sequence
  Synthetic Construct
cuuugccacaagaugaccc

SEQ ID NO: 1808 - RNA, 19 nt, Artificial Sequence
  Synthetic Construct
ccuuugccacaagaugacc

SEQ ID NO: 1809 - RNA, 19 nt, Artificial Sequence
  Synthetic Construct
gccuuugccacaagaugac

SEQ ID NO: 1810 - RNA, 19 nt, Artificial Sequence
  Synthetic Construct
cgccuuugccacaagauga

SEQ ID NO: 1811 - RNA, 19 nt, Artificial Sequence
  Synthetic Construct
ccgccuuugccacaagaug

SEQ ID NO: 1812 - RNA, 19 nt, Artificial Sequence
  Synthetic Construct
gccgccuuugccacaagau

SEQ ID NO: 1813 - RNA, 19 nt, Artificial Sequence
  Synthetic Construct
ugccgccuuugccacaaga

SEQ ID NO: 1814 - RNA, 19 nt, Artificial Sequence
  Synthetic Construct
uugccgccuuugccacaag

SEQ ID NO: 1815 - RNA, 19 nt, Artificial Sequence
  Synthetic Construct
guugccgccuuugccacaa

SEQ ID NO: 1816 - RNA, 19 nt, Artificial Sequence
  Synthetic Construct
cguugccgccuuugccaca

SEQ ID NO: 1817 - RNA, 19 nt, Artificial Sequence
  Synthetic Construct
gcguugccgccuuugccac

SEQ ID NO: 1818 - RNA, 19 nt, Artificial Sequence
  Synthetic Construct
ggcguugccgccuuugcca

SEQ ID NO: 1819 - RNA, 19 nt, Artificial Sequence
  Synthetic Construct
cggcguugccgccuuugcc

SEQ ID NO: 1820 - RNA, 19 nt, Artificial Sequence
  Synthetic Construct
ucggcguugccgccuuugc

SEQ ID NO: 1821 - RNA, 19 nt, Artificial Sequence
  Synthetic Construct
cucggcguugccgccuuug

SEQ ID NO: 1822 - RNA, 19 nt, Artificial Sequence
  Synthetic Construct
ccucggcguugccgccuuu

SEQ ID NO: 1823 - RNA, 19 nt, Artificial Sequence
  Synthetic Construct
uccucggcguugccgccuu

SEQ ID NO: 1824 - RNA, 19 nt, Artificial Sequence
  Synthetic Construct
cuccucggcguugccgccu

SEQ ID NO: 1825 - RNA, 19 nt, Artificial Sequence
  Synthetic Construct
ucuccucggcguugccgcc

SEQ ID NO: 1826 - RNA, 19 nt, Artificial Sequence
  Synthetic Construct
cucuccucggcguugccgc

SEQ ID NO: 1827 - RNA, 19 nt, Artificial Sequence
  Synthetic Construct
ccucuccucggcguugccg

SEQ ID NO: 1828 - RNA, 19 nt, Artificial Sequence
  Synthetic Construct
uccucuccucggcguugcc

SEQ ID NO: 1829 - RNA, 19 nt, Artificial Sequence
  Synthetic Construct
cuccucuccucggcguugc

SEQ ID NO: 1830 - RNA, 19 nt, Artificial Sequence
  Synthetic Construct
ucuccucuccucggcguug

SEQ ID NO: 1831 - RNA, 19 nt, Artificial Sequence
  Synthetic Construct
cucuccucuccucggcguu

SEQ ID NO: 1832 - RNA, 18 nt, Artificial Sequence
  Synthetic Construct
gccccuccucgccugguu

SEQ ID NO: 1833 - RNA, 18 nt, Artificial Sequence
  Synthetic Construct
ggccccuccucgccuggu

SEQ ID NO: 1834 - RNA, 18 nt, Artificial Sequence
  Synthetic Construct
uggccccuccucgccugg

SEQ ID NO: 1835 - RNA, 18 nt, Artificial Sequence
  Synthetic Construct
uuggccccuccucgccug

SEQ ID NO: 1836 - RNA, 18 nt, Artificial Sequence
  Synthetic Construct
guuggccccuccucgccu

SEQ ID NO: 1837 - RNA, 18 nt, Artificial Sequence
  Synthetic Construct
aguuggccccuccucgcc

SEQ ID NO: 1838 - RNA, 18 nt, Artificial Sequence
  Synthetic Construct
caguuggccccuccucgc

SEQ ID NO: 1839 - RNA, 18 nt, Artificial Sequence
  Synthetic Construct
gcaguuggccccuccucg

SEQ ID NO: 1840 - RNA, 18 nt, Artificial Sequence
  Synthetic Construct
ugcaguuggccccuccuc

SEQ ID NO: 1841 - RNA, 18 nt, Artificial Sequence
  Synthetic Construct
cugcaguuggccccuccu

SEQ ID NO: 1842 - RNA, 18 nt, Artificial Sequence
  Synthetic Construct
ccugcaguuggccccucc

SEQ ID NO: 1843 - RNA, 18 nt, Artificial Sequence
  Synthetic Construct
accugcaguuggccccuc

SEQ ID NO: 1844 - RNA, 18 nt, Artificial Sequence
  Synthetic Construct
caccugcaguuggccccu

SEQ ID NO: 1845 - RNA, 18 nt, Artificial Sequence
  Synthetic Construct
ucaccugcaguuggcccc

SEQ ID NO: 1846 - RNA, 18 nt, Artificial Sequence
  Synthetic Construct
cucaccugcaguuggccc

SEQ ID NO: 1847 - RNA, 18 nt, Artificial Sequence
  Synthetic Construct
ccucaccugcaguuggcc

SEQ ID NO: 1848 - RNA, 18 nt, Artificial Sequence
  Synthetic Construct
cccucaccugcaguuggc

SEQ ID NO: 1849 - RNA, 18 nt, Artificial Sequence
  Synthetic Construct
ccccucaccugcaguugg

SEQ ID NO: 1850 - RNA, 18 nt, Artificial Sequence
  Synthetic Construct
accccucaccugcaguug

SEQ ID NO: 1851 - RNA, 18 nt, Artificial Sequence
  Synthetic Construct
aaccccucaccugcaguu

SEQ ID NO: 1852 - RNA, 18 nt, Artificial Sequence
  Synthetic Construct
aaaccccucaccugcagu

SEQ ID NO: 1853 - RNA, 18 nt, Artificial Sequence
  Synthetic Construct
caaaccccucaccugcag

SEQ ID NO: 1854 - RNA, 18 nt, Artificial Sequence
  Synthetic Construct
ucaaaccccucaccugca

SEQ ID NO: 1855 - RNA, 18 nt, Artificial Sequence
  Synthetic Construct
aucaaaccccucaccugc

SEQ ID NO: 1856 - RNA, 18 nt, Artificial Sequence
  Synthetic Construct
uaucaaaccccucaccug

SEQ ID NO: 1857 - RNA, 18 nt, Artificial Sequence
  Synthetic Construct
uuaucaaaccccucaccu

SEQ ID NO: 1858 - RNA, 18 nt, Artificial Sequence
  Synthetic Construct
uuuaucaaaccccucacc

SEQ ID NO: 1859 - RNA, 18 nt, Artificial Sequence
  Synthetic Construct
cuuuaucaaaccccucac

SEQ ID NO: 1860 - RNA, 18 nt, Artificial Sequence
  Synthetic Construct
acuuuaucaaaccccuca

SEQ ID NO: 1861 - RNA, 18 nt, Artificial Sequence
  Synthetic Construct
gacuuuaucaaaccccuc

SEQ ID NO: 1862 - RNA, 18 nt, Artificial Sequence
  Synthetic Construct
ugacuuuaucaaaccccu

SEQ ID NO: 1863 - RNA, 18 nt, Artificial Sequence
  Synthetic Construct
cugacuuuaucaaacccc

SEQ ID NO: 1864 - RNA, 18 nt, Artificial Sequence
  Synthetic Construct
ccugacuuuaucaaaccc

SEQ ID NO: 1865 - RNA, 18 nt, Artificial Sequence
  Synthetic Construct
cccugacuuuaucaaacc

SEQ ID NO: 1866 - RNA, 18 nt, Artificial Sequence
  Synthetic Construct
ucccugacuuuaucaaac

SEQ ID NO: 1867 - RNA, 18 nt, Artificial Sequence
  Synthetic Construct
uucccugacuuuaucaaa

SEQ ID NO: 1868 - RNA, 18 nt, Artificial Sequence
  Synthetic Construct
cuucccugacuuuaucaa

SEQ ID NO: 1869 - RNA, 18 nt, Artificial Sequence
  Synthetic Construct
gcuucccugacuuuauca

SEQ ID NO: 1870 - RNA, 18 nt, Artificial Sequence
  Synthetic Construct
ugcuucccugacuuuauc

SEQ ID NO: 1871 - RNA, 18 nt, Artificial Sequence
  Synthetic Construct
cugcuucccugacuuuau

SEQ ID NO: 1872 - RNA, 18 nt, Artificial Sequence
  Synthetic Construct
ucugcuucccugacuuua

SEQ ID NO: 1873 - RNA, 18 nt, Artificial Sequence
  Synthetic Construct
uucugcuucccugacuuu

SEQ ID NO: 1874 - RNA, 18 nt, Artificial Sequence
  Synthetic Construct
cuucugcuucccugacuu

SEQ ID NO: 1875 - RNA, 18 nt, Artificial Sequence
  Synthetic Construct
ucuucugcuucccugacu

SEQ ID NO: 1876 - RNA, 18 nt, Artificial Sequence
  Synthetic Construct
aucuucugcuucccugac

SEQ ID NO: 1877 - RNA, 18 nt, Artificial Sequence
  Synthetic Construct
uaucuucugcuucccuga

SEQ ID NO: 1878 - RNA, 18 nt, Artificial Sequence
  Synthetic Construct
cuaucuucugcuucccug

SEQ ID NO: 1879 - RNA, 18 nt, Artificial Sequence
  Synthetic Construct
gcuaucuucugcuucccu

SEQ ID NO: 1880 - RNA, 18 nt, Artificial Sequence
  Synthetic Construct
ggcuaucuucugcuuccc

SEQ ID NO: 1881 - RNA, 18 nt, Artificial Sequence
  Synthetic Construct
gggcuaucuucugcuucc

SEQ ID NO: 1882 - RNA, 18 nt, Artificial Sequence
  Synthetic Construct
ggggcuaucuucugcuuc

SEQ ID NO: 1883 - RNA, 18 nt, Artificial Sequence
  Synthetic Construct
gggggcuaucuucugcuu

SEQ ID NO: 1884 - RNA, 18 nt, Artificial Sequence
  Synthetic Construct
ugggggcuaucuucugcu

SEQ ID NO: 1885 - RNA, 18 nt, Artificial Sequence
  Synthetic Construct
uugggggcuaucuucugc

SEQ ID NO: 1886 - RNA, 18 nt, Artificial Sequence
  Synthetic Construct
guugggggcuaucuucug

SEQ ID NO: 1887 - RNA, 18 nt, Artificial Sequence
  Synthetic Construct
uguugggggcuaucuucu

SEQ ID NO: 1888 - RNA, 18 nt, Artificial Sequence
  Synthetic Construct
guguugggggcuaucuuc

SEQ ID NO: 1889 - RNA, 18 nt, Artificial Sequence
  Synthetic Construct
uguguugggggcuaucuu

SEQ ID NO: 1890 - RNA, 18 nt, Artificial Sequence
  Synthetic Construct
auguguugggggcuaucu

SEQ ID NO: 1891 - RNA, 18 nt, Artificial Sequence
  Synthetic Construct
cauguguugggggcuauc

SEQ ID NO: 1892 - RNA, 18 nt, Artificial Sequence
  Synthetic Construct
acauguguugggggcuau

SEQ ID NO: 1893 - RNA, 18 nt, Artificial Sequence
  Synthetic Construct
cacauguguugggggcua

SEQ ID NO: 1894 - RNA, 18 nt, Artificial Sequence
  Synthetic Construct
ucacauguguugggggcu

SEQ ID NO: 1895 - RNA, 18 nt, Artificial Sequence
  Synthetic Construct
gucacauguguugggggc

SEQ ID NO: 1896 - RNA, 18 nt, Artificial Sequence
  Synthetic Construct
agucacauguguuggggg

SEQ ID NO: 1897 - RNA, 18 nt, Artificial Sequence
  Synthetic Construct
cagucacauguguugggg

SEQ ID NO: 1898 - RNA, 18 nt, Artificial Sequence
  Synthetic Construct
ccagucacauguguuggg

SEQ ID NO: 1899 - RNA, 18 nt, Artificial Sequence
  Synthetic Construct
cccagucacauguguugg

SEQ ID NO: 1900 - RNA, 18 nt, Artificial Sequence
  Synthetic Construct
ccccagucacauguguug

SEQ ID NO: 1901 - RNA, 18 nt, Artificial Sequence
  Synthetic Construct
cccccagucacauguguu

SEQ ID NO: 1902 - RNA, 18 nt, Artificial Sequence
  Synthetic Construct
ccccccagucacaugugu

SEQ ID NO: 1903 - RNA, 18 nt, Artificial Sequence
  Synthetic Construct
uccccccagucacaugug

SEQ ID NO: 1904 - RNA, 18 nt, Artificial Sequence
  Synthetic Construct
auccccccagucacaugu

SEQ ID NO: 1905 - RNA, 18 nt, Artificial Sequence
  Synthetic Construct
cauccccccagucacaug

SEQ ID NO: 1906 - RNA, 18 nt, Artificial Sequence
  Synthetic Construct
ccauccccccagucacau

SEQ ID NO: 1907 - RNA, 18 nt, Artificial Sequence
  Synthetic Construct
accauccccccagucaca

SEQ ID NO: 1908 - RNA, 18 nt, Artificial Sequence
  Synthetic Construct
gaccauccccccagucac

SEQ ID NO: 1909 - RNA, 18 nt, Artificial Sequence
  Synthetic Construct
ugaccauccccccaguca

SEQ ID NO: 1910 - RNA, 18 nt, Artificial Sequence
  Synthetic Construct
uugaccauccccccaguc

SEQ ID NO: 1911 - RNA, 18 nt, Artificial Sequence
  Synthetic Construct
guugaccauccccccagu

SEQ ID NO: 1912 - RNA, 18 nt, Artificial Sequence
  Synthetic Construct
uguugaccauccccccag

SEQ ID NO: 1913 - RNA, 18 nt, Artificial Sequence
  Synthetic Construct
uuguugaccaucccccca

SEQ ID NO: 1914 - RNA, 18 nt, Artificial Sequence
  Synthetic Construct
cuuguugaccaucccccc

SEQ ID NO: 1915 - RNA, 18 nt, Artificial Sequence
  Synthetic Construct
ucuuguugaccauccccc

SEQ ID NO: 1916 - RNA, 18 nt, Artificial Sequence
  Synthetic Construct
uucuuguugaccaucccc

SEQ ID NO: 1917 - RNA, 18 nt, Artificial Sequence
  Synthetic Construct
uuucuuguugaccauccc

SEQ ID NO: 1918 - RNA, 18 nt, Artificial Sequence
  Synthetic Construct
cuuucuuguugaccaucc

SEQ ID NO: 1919 - RNA, 18 nt, Artificial Sequence
  Synthetic Construct
ccuuucuuguugaccauc

SEQ ID NO: 1920 - RNA, 18 nt, Artificial Sequence
  Synthetic Construct
uccuuucuuguugaccau

SEQ ID NO: 1921 - RNA, 18 nt, Artificial Sequence
  Synthetic Construct
uuccuuucuuguugacca

SEQ ID NO: 1922 - RNA, 18 nt, Artificial Sequence
  Synthetic Construct
auuccuuucuuguugacc

SEQ ID NO: 1923 - RNA, 18 nt, Artificial Sequence
  Synthetic Construct
cauuccuuucuuguugac

SEQ ID NO: 1924 - RNA, 18 nt, Artificial Sequence
  Synthetic Construct
ccauuccuuucuuguuga

SEQ ID NO: 1925 - RNA, 18 nt, Artificial Sequence
  Synthetic Construct
accauuccuuucuuguug

SEQ ID NO: 1926 - RNA, 18 nt, Artificial Sequence
  Synthetic Construct
caccauuccuuucuuguu

SEQ ID NO: 1927 - RNA, 18 nt, Artificial Sequence
  Synthetic Construct
ucaccauuccuuucuugu

SEQ ID NO: 1928 - RNA, 18 nt, Artificial Sequence
  Synthetic Construct
cucaccauuccuuucuug

SEQ ID NO: 1929 - RNA, 18 nt, Artificial Sequence
  Synthetic Construct
acucaccauuccuuucuu

SEQ ID NO: 1930 - RNA, 18 nt, Artificial Sequence
  Synthetic Construct
cacucaccauuccuuucu

SEQ ID NO: 1931 - RNA, 18 nt, Artificial Sequence
  Synthetic Construct
ccacucaccauuccuuuc

SEQ ID NO: 1932 - RNA, 18 nt, Artificial Sequence
  Synthetic Construct
accacucaccauuccuuu

SEQ ID NO: 1933 - RNA, 18 nt, Artificial Sequence
  Synthetic Construct
caccacucaccauuccuu

SEQ ID NO: 1934 - RNA, 18 nt, Artificial Sequence
  Synthetic Construct
ccaccacucaccauuccu

SEQ ID NO: 1935 - RNA, 18 nt, Artificial Sequence
  Synthetic Construct
accaccacucaccauucc

SEQ ID NO: 1936 - RNA, 18 nt, Artificial Sequence
  Synthetic Construct
caccaccacucaccauuc

SEQ ID NO: 1937 - RNA, 18 nt, Artificial Sequence
  Synthetic Construct
ccaccaccacucaccauu

SEQ ID NO: 1938 - RNA, 18 nt, Artificial Sequence
  Synthetic Construct
gccaccaccacucaccau

SEQ ID NO: 1939 - RNA, 18 nt, Artificial Sequence
  Synthetic Construct
agccaccaccacucacca

SEQ ID NO: 1940 - RNA, 18 nt, Artificial Sequence
  Synthetic Construct
cagccaccaccacucacc

SEQ ID NO: 1941 - RNA, 18 nt, Artificial Sequence
  Synthetic Construct
acagccaccaccacucac

SEQ ID NO: 1942 - RNA, 18 nt, Artificial Sequence
  Synthetic Construct
cacagccaccaccacuca

SEQ ID NO: 1943 - RNA, 18 nt, Artificial Sequence
  Synthetic Construct
gcacagccaccaccacuc

SEQ ID NO: 1944 - RNA, 18 nt, Artificial Sequence
  Synthetic Construct
agcacagccaccaccacu

SEQ ID NO: 1945 - RNA, 18 nt, Artificial Sequence
  Synthetic Construct
gagcacagccaccaccac

SEQ ID NO: 1946 - RNA, 18 nt, Artificial Sequence
  Synthetic Construct
agagcacagccaccacca

SEQ ID NO: 1947 - RNA, 18 nt, Artificial Sequence
  Synthetic Construct
gagagcacagccaccacc

SEQ ID NO: 1948 - RNA, 18 nt, Artificial Sequence
  Synthetic Construct
ugagagcacagccaccac

SEQ ID NO: 1949 - RNA, 18 nt, Artificial Sequence
  Synthetic Construct
uugagagcacagccacca

SEQ ID NO: 1950 - RNA, 18 nt, Artificial Sequence
  Synthetic Construct
auugagagcacagccacc

SEQ ID NO: 1951 - RNA, 18 nt, Artificial Sequence
  Synthetic Construct
aauugagagcacagccac

SEQ ID NO: 1952 - RNA, 18 nt, Artificial Sequence
  Synthetic Construct
aaauugagagcacagcca

SEQ ID NO: 1953 - RNA, 18 nt, Artificial Sequence
  Synthetic Construct
aaaauugagagcacagcc

SEQ ID NO: 1954 - RNA, 18 nt, Artificial Sequence
  Synthetic Construct
gaaaauugagagcacagc

SEQ ID NO: 1955 - RNA, 18 nt, Artificial Sequence
  Synthetic Construct
ggaaaauugagagcacag

SEQ ID NO: 1956 - RNA, 18 nt, Artificial Sequence
  Synthetic Construct
gggaaaauugagagcaca

SEQ ID NO: 1957 - RNA, 18 nt, Artificial Sequence
  Synthetic Construct
agggaaaauugagagcac

SEQ ID NO: 1958 - RNA, 18 nt, Artificial Sequence
  Synthetic Construct
cagggaaaauugagagca

SEQ ID NO: 1959 - RNA, 18 nt, Artificial Sequence
  Synthetic Construct
acagggaaaauugagagc

SEQ ID NO: 1960 - RNA, 18 nt, Artificial Sequence
  Synthetic Construct
gacagggaaaauugagag

SEQ ID NO: 1961 - RNA, 18 nt, Artificial Sequence
  Synthetic Construct
agacagggaaaauugaga

SEQ ID NO: 1962 - RNA, 18 nt, Artificial Sequence
  Synthetic Construct
gagacagggaaaauugag

SEQ ID NO: 1963 - RNA, 18 nt, Artificial Sequence
  Synthetic Construct
ggagacagggaaaauuga

SEQ ID NO: 1964 - RNA, 18 nt, Artificial Sequence
  Synthetic Construct
cggagacagggaaaauug

SEQ ID NO: 1965 - RNA, 18 nt, Artificial Sequence
  Synthetic Construct
acggagacagggaaaauu

SEQ ID NO: 1966 - RNA, 18 nt, Artificial Sequence
  Synthetic Construct
uacggagacagggaaaau

SEQ ID NO: 1967 - RNA, 18 nt, Artificial Sequence
  Synthetic Construct
guacggagacagggaaaa

SEQ ID NO: 1968 - RNA, 18 nt, Artificial Sequence
  Synthetic Construct
uguacggagacagggaaa

SEQ ID NO: 1969 - RNA, 18 nt, Artificial Sequence
  Synthetic Construct
cuguacggagacagggaa

SEQ ID NO: 1970 - RNA, 18 nt, Artificial Sequence
  Synthetic Construct
ccuguacggagacaggga

SEQ ID NO: 1971 - RNA, 18 nt, Artificial Sequence
  Synthetic Construct
gccuguacggagacaggg

SEQ ID NO: 1972 - RNA, 18 nt, Artificial Sequence
  Synthetic Construct
agccuguacggagacagg

SEQ ID NO: 1973 - RNA, 18 nt, Artificial Sequence
  Synthetic Construct
gagccuguacggagacag

SEQ ID NO: 1974 - RNA, 18 nt, Artificial Sequence
  Synthetic Construct
agagccuguacggagaca

SEQ ID NO: 1975 - RNA, 18 nt, Artificial Sequence
  Synthetic Construct
cagagccuguacggagac

SEQ ID NO: 1976 - RNA, 18 nt, Artificial Sequence
  Synthetic Construct
acagagccuguacggaga

SEQ ID NO: 1977 - RNA, 18 nt, Artificial Sequence
  Synthetic Construct
cacagagccuguacggag

SEQ ID NO: 1978 - RNA, 18 nt, Artificial Sequence
  Synthetic Construct
ccacagagccuguacgga

SEQ ID NO: 1979 - RNA, 18 nt, Artificial Sequence
  Synthetic Construct
cccacagagccuguacgg

SEQ ID NO: 1980 - RNA, 18 nt, Artificial Sequence
  Synthetic Construct
ucccacagagccuguacg

SEQ ID NO: 1981 - RNA, 18 nt, Artificial Sequence
  Synthetic Construct
cucccacagagccuguac

SEQ ID NO: 1982 - RNA, 18 nt, Artificial Sequence
  Synthetic Construct
ccucccacagagccugua

SEQ ID NO: 1983 - RNA, 18 nt, Artificial Sequence
  Synthetic Construct
uccucccacagagccugu

SEQ ID NO: 1984 - RNA, 18 nt, Artificial Sequence
  Synthetic Construct
auccucccacagagccug

SEQ ID NO: 1985 - RNA, 18 nt, Artificial Sequence
  Synthetic Construct
gauccucccacagagccu

SEQ ID NO: 1986 - RNA, 18 nt, Artificial Sequence
  Synthetic Construct
ugauccucccacagagcc

SEQ ID NO: 1987 - RNA, 18 nt, Artificial Sequence
  Synthetic Construct
cugauccucccacagagc

SEQ ID NO: 1988 - RNA, 18 nt, Artificial Sequence
  Synthetic Construct
ccugauccucccacagag

SEQ ID NO: 1989 - RNA, 18 nt, Artificial Sequence
  Synthetic Construct
cccugauccucccacaga

SEQ ID NO: 1990 - RNA, 18 nt, Artificial Sequence
  Synthetic Construct
gcccugauccucccacag

SEQ ID NO: 1991 - RNA, 18 nt, Artificial Sequence
  Synthetic Construct
agcccugauccucccaca

SEQ ID NO: 1992 - RNA, 18 nt, Artificial Sequence
  Synthetic Construct
cagcccugauccucccac

SEQ ID NO: 1993 - RNA, 18 nt, Artificial Sequence
  Synthetic Construct
ccagcccugauccuccca

SEQ ID NO: 1994 - RNA, 18 nt, Artificial Sequence
  Synthetic Construct
cccagcccugauccuccc

SEQ ID NO: 1995 - RNA, 18 nt, Artificial Sequence
  Synthetic Construct
ucccagcccugauccucc

SEQ ID NO: 1996 - RNA, 18 nt, Artificial Sequence
  Synthetic Construct
uucccagcccugauccuc

SEQ ID NO: 1997 - RNA, 18 nt, Artificial Sequence
  Synthetic Construct
guucccagcccugauccu

SEQ ID NO: 1998 - RNA, 18 nt, Artificial Sequence
  Synthetic Construct
aguucccagcccugaucc

SEQ ID NO: 1999 - RNA, 18 nt, Artificial Sequence
  Synthetic Construct
gaguucccagcccugauc

SEQ ID NO: 2000 - RNA, 18 nt, Artificial Sequence
  Synthetic Construct
agaguucccagcccugau

SEQ ID NO: 2001 - RNA, 18 nt, Artificial Sequence
  Synthetic Construct
uagaguucccagcccuga

SEQ ID NO: 2002 - RNA, 18 nt, Artificial Sequence
  Synthetic Construct
cuagaguucccagcccug

SEQ ID NO: 2003 - RNA, 18 nt, Artificial Sequence
  Synthetic Construct
gcuagaguucccagcccu

SEQ ID NO: 2004 - RNA, 18 nt, Artificial Sequence
  Synthetic Construct
ggcuagaguucccagccc

SEQ ID NO: 2005 - RNA, 18 nt, Artificial Sequence
  Synthetic Construct
gggcuagaguucccagcc

SEQ ID NO: 2006 - RNA, 18 nt, Artificial Sequence
  Synthetic Construct
agggcuagaguucccagc

SEQ ID NO: 2007 - RNA, 18 nt, Artificial Sequence
  Synthetic Construct
cagggcuagaguucccag

SEQ ID NO: 2008 - RNA, 18 nt, Artificial Sequence
  Synthetic Construct
ccagggcuagaguuccca

SEQ ID NO: 2009 - RNA, 18 nt, Artificial Sequence
  Synthetic Construct
gccagggcuagaguuccc

SEQ ID NO: 2010 - RNA, 18 nt, Artificial Sequence
  Synthetic Construct
ggccagggcuagaguucc

SEQ ID NO: 2011 - RNA, 18 nt, Artificial Sequence
  Synthetic Construct
gggccagggcuagaguuc

SEQ ID NO: 2012 - RNA, 18 nt, Artificial Sequence
  Synthetic Construct
agggccagggcuagaguu

SEQ ID NO: 2013 - RNA, 18 nt, Artificial Sequence
  Synthetic Construct
cagggccagggcuagagu

SEQ ID NO: 2014 - RNA, 18 nt, Artificial Sequence
  Synthetic Construct
ccagggccagggcuagag

SEQ ID NO: 2015 - RNA, 18 nt, Artificial Sequence
  Synthetic Construct
cccagggccagggcuaga

SEQ ID NO: 2016 - RNA, 18 nt, Artificial Sequence
  Synthetic Construct
ccccagggccagggcuag

SEQ ID NO: 2017 - RNA, 18 nt, Artificial Sequence
  Synthetic Construct
uccccagggccagggcua

SEQ ID NO: 2018 - RNA, 18 nt, Artificial Sequence
  Synthetic Construct
auccccagggccagggcu

SEQ ID NO: 2019 - RNA, 18 nt, Artificial Sequence
  Synthetic Construct
gauccccagggccagggc

SEQ ID NO: 2020 - RNA, 18 nt, Artificial Sequence
  Synthetic Construct
ggauccccagggccaggg

SEQ ID NO: 2021 - RNA, 18 nt, Artificial Sequence
  Synthetic Construct
aggauccccagggccagg

SEQ ID NO: 2022 - RNA, 18 nt, Artificial Sequence
  Synthetic Construct
caggauccccagggccag

SEQ ID NO: 2023 - RNA, 18 nt, Artificial Sequence
  Synthetic Construct
ccaggauccccagggcca

SEQ ID NO: 2024 - RNA, 18 nt, Artificial Sequence
  Synthetic Construct
cccaggauccccagggcc

SEQ ID NO: 2025 - RNA, 18 nt, Artificial Sequence
  Synthetic Construct
ucccaggauccccagggc

SEQ ID NO: 2026 - RNA, 18 nt, Artificial Sequence
  Synthetic Construct
cucccaggauccccaggg

SEQ ID NO: 2027 - RNA, 18 nt, Artificial Sequence
  Synthetic Construct
ccucccaggauccccagg

SEQ ID NO: 2028 - RNA, 18 nt, Artificial Sequence
  Synthetic Construct
gccucccaggauccccag

SEQ ID NO: 2029 - RNA, 18 nt, Artificial Sequence
  Synthetic Construct
ggccucccaggaucccca

SEQ ID NO: 2030 - RNA, 18 nt, Artificial Sequence
  Synthetic Construct
aggccucccaggaucccc

SEQ ID NO: 2031 - RNA, 18 nt, Artificial Sequence
  Synthetic Construct
caggccucccaggauccc

SEQ ID NO: 2032 - RNA, 18 nt, Artificial Sequence
  Synthetic Construct
ccaggccucccaggaucc

SEQ ID NO: 2033 - RNA, 18 nt, Artificial Sequence
  Synthetic Construct
cccaggccucccaggauc

SEQ ID NO: 2034 - RNA, 18 nt, Artificial Sequence
  Synthetic Construct
ccccaggccucccaggau

SEQ ID NO: 2035 - RNA, 18 nt, Artificial Sequence
  Synthetic Construct
uccccaggccucccagga

SEQ ID NO: 2036 - RNA, 18 nt, Artificial Sequence
  Synthetic Construct
guccccaggccucccagg

SEQ ID NO: 2037 - RNA, 18 nt, Artificial Sequence
  Synthetic Construct
uguccccaggccucccag

SEQ ID NO: 2038 - RNA, 18 nt, Artificial Sequence
  Synthetic Construct
cuguccccaggccuccca

SEQ ID NO: 2039 - RNA, 18 nt, Artificial Sequence
  Synthetic Construct
gcuguccccaggccuccc

SEQ ID NO: 2040 - RNA, 18 nt, Artificial Sequence
  Synthetic Construct
ggcuguccccaggccucc

SEQ ID NO: 2041 - RNA, 18 nt, Artificial Sequence
  Synthetic Construct
cggcuguccccaggccuc

SEQ ID NO: 2042 - RNA, 18 nt, Artificial Sequence
  Synthetic Construct
gcggcuguccccaggccu

SEQ ID NO: 2043 - RNA, 18 nt, Artificial Sequence
  Synthetic Construct
ggcggcuguccccaggcc

SEQ ID NO: 2044 - RNA, 18 nt, Artificial Sequence
  Synthetic Construct
gggcggcuguccccaggc

SEQ ID NO: 2045 - RNA, 18 nt, Artificial Sequence
  Synthetic Construct
agggcggcuguccccagg

SEQ ID NO: 2046 - RNA, 18 nt, Artificial Sequence
  Synthetic Construct
cagggcggcuguccccag

SEQ ID NO: 2047 - RNA, 18 nt, Artificial Sequence
  Synthetic Construct
gcagggcggcugucccca

SEQ ID NO: 2048 - RNA, 18 nt, Artificial Sequence
  Synthetic Construct
agcagggcggcugucccc

SEQ ID NO: 2049 - RNA, 18 nt, Artificial Sequence
  Synthetic Construct
gagcagggcggcuguccc

SEQ ID NO: 2050 - RNA, 18 nt, Artificial Sequence
  Synthetic Construct
ugagcagggcggcugucc

SEQ ID NO: 2051 - RNA, 18 nt, Artificial Sequence
  Synthetic Construct
augagcagggcggcuguc

SEQ ID NO: 2052 - RNA, 18 nt, Artificial Sequence
  Synthetic Construct
aaugagcagggcggcugu

SEQ ID NO: 2053 - RNA, 18 nt, Artificial Sequence
  Synthetic Construct
caaugagcagggcggcug

SEQ ID NO: 2054 - RNA, 18 nt, Artificial Sequence
  Synthetic Construct
ccaaugagcagggcggcu

SEQ ID NO: 2055 - RNA, 18 nt, Artificial Sequence
  Synthetic Construct
cccaaugagcagggcggc

SEQ ID NO: 2056 - RNA, 18 nt, Artificial Sequence
  Synthetic Construct
ccccaaugagcagggcgg

SEQ ID NO: 2057 - RNA, 18 nt, Artificial Sequence
  Synthetic Construct
accccaaugagcagggcg

SEQ ID NO: 2058 - RNA, 18 nt, Artificial Sequence
  Synthetic Construct
gaccccaaugagcagggc

SEQ ID NO: 2059 - RNA, 18 nt, Artificial Sequence
  Synthetic Construct
ugaccccaaugagcaggg

SEQ ID NO: 2060 - RNA, 18 nt, Artificial Sequence
  Synthetic Construct
augaccccaaugagcagg

SEQ ID NO: 2061 - RNA, 18 nt, Artificial Sequence
  Synthetic Construct
gaugaccccaaugagcag

SEQ ID NO: 2062 - RNA, 18 nt, Artificial Sequence
  Synthetic Construct
agaugaccccaaugagca

SEQ ID NO: 2063 - RNA, 18 nt, Artificial Sequence
  Synthetic Construct
aagaugaccccaaugagc

SEQ ID NO: 2064 - RNA, 18 nt, Artificial Sequence
  Synthetic Construct
caagaugaccccaaugag

SEQ ID NO: 2065 - RNA, 18 nt, Artificial Sequence
  Synthetic Construct
acaagaugaccccaauga

SEQ ID NO: 2066 - RNA, 18 nt, Artificial Sequence
  Synthetic Construct
cacaagaugaccccaaug

SEQ ID NO: 2067 - RNA, 18 nt, Artificial Sequence
  Synthetic Construct
ccacaagaugaccccaau

SEQ ID NO: 2068 - RNA, 18 nt, Artificial Sequence
  Synthetic Construct
gccacaagaugaccccaa

SEQ ID NO: 2069 - RNA, 18 nt, Artificial Sequence
  Synthetic Construct
ugccacaagaugacccca

SEQ ID NO: 2070 - RNA, 18 nt, Artificial Sequence
  Synthetic Construct
uugccacaagaugacccc

SEQ ID NO: 2071 - RNA, 18 nt, Artificial Sequence
  Synthetic Construct
uuugccacaagaugaccc

SEQ ID NO: 2072 - RNA, 18 nt, Artificial Sequence
  Synthetic Construct
cuuugccacaagaugacc

SEQ ID NO: 2073 - RNA, 18 nt, Artificial Sequence
  Synthetic Construct
ccuuugccacaagaugac

SEQ ID NO: 2074 - RNA, 18 nt, Artificial Sequence
  Synthetic Construct
gccuuugccacaagauga

SEQ ID NO: 2075 - RNA, 18 nt, Artificial Sequence
  Synthetic Construct
cgccuuugccacaagaug

SEQ ID NO: 2076 - RNA, 18 nt, Artificial Sequence
  Synthetic Construct
ccgccuuugccacaagau

SEQ ID NO: 2077 - RNA, 18 nt, Artificial Sequence
  Synthetic Construct
gccgccuuugccacaaga

SEQ ID NO: 2078 - RNA, 18 nt, Artificial Sequence
  Synthetic Construct
ugccgccuuugccacaag

SEQ ID NO: 2079 - RNA, 18 nt, Artificial Sequence
  Synthetic Construct
uugccgccuuugccacaa

SEQ ID NO: 2080 - RNA, 18 nt, Artificial Sequence
  Synthetic Construct
guugccgccuuugccaca

SEQ ID NO: 2081 - RNA, 18 nt, Artificial Sequence
  Synthetic Construct
cguugccgccuuugccac

SEQ ID NO: 2082 - RNA, 18 nt, Artificial Sequence
  Synthetic Construct
gcguugccgccuuugcca

SEQ ID NO: 2083 - RNA, 18 nt, Artificial Sequence
  Synthetic Construct
ggcguugccgccuuugcc

SEQ ID NO: 2084 - RNA, 18 nt, Artificial Sequence
  Synthetic Construct
cggcguugccgccuuugc

SEQ ID NO: 2085 - RNA, 18 nt, Artificial Sequence
  Synthetic Construct
ucggcguugccgccuuug

SEQ ID NO: 2086 - RNA, 18 nt, Artificial Sequence
  Synthetic Construct
cucggcguugccgccuuu

SEQ ID NO: 2087 - RNA, 18 nt, Artificial Sequence
  Synthetic Construct
ccucggcguugccgccuu

SEQ ID NO: 2088 - RNA, 18 nt, Artificial Sequence
  Synthetic Construct
uccucggcguugccgccu

SEQ ID NO: 2089 - RNA, 18 nt, Artificial Sequence
  Synthetic Construct
cuccucggcguugccgcc

SEQ ID NO: 2090 - RNA, 18 nt, Artificial Sequence
  Synthetic Construct
ucuccucggcguugccgc

SEQ ID NO: 2091 - RNA, 18 nt, Artificial Sequence
  Synthetic Construct
cucuccucggcguugccg

SEQ ID NO: 2092 - RNA, 18 nt, Artificial Sequence
  Synthetic Construct
ccucuccucggcguugcc

SEQ ID NO: 2093 - RNA, 18 nt, Artificial Sequence
  Synthetic Construct
uccucuccucggcguugc

SEQ ID NO: 2094 - RNA, 18 nt, Artificial Sequence
  Synthetic Construct
cuccucuccucggcguug

SEQ ID NO: 2095 - RNA, 18 nt, Artificial Sequence
  Synthetic Construct
ucuccucuccucggcguu

SEQ ID NO: 2096 - RNA, 18 nt, Artificial Sequence
  Synthetic Construct
cucuccucuccucggcgu

SEQ ID NO: 2097 - RNA, 17 nt, Artificial Sequence
  Synthetic Construct
ccccuccucgccugguu

SEQ ID NO: 2098 - RNA, 17 nt, Artificial Sequence
  Synthetic Construct
gccccuccucgccuggu

SEQ ID NO: 2099 - RNA, 17 nt, Artificial Sequence
  Synthetic Construct
ggccccuccucgccugg

SEQ ID NO: 2100 - RNA, 17 nt, Artificial Sequence
  Synthetic Construct
uggccccuccucgccug

SEQ ID NO: 2101 - RNA, 17 nt, Artificial Sequence
  Synthetic Construct
uuggccccuccucgccu

SEQ ID NO: 2102 - RNA, 17 nt, Artificial Sequence
  Synthetic Construct
guuggccccuccucgcc

SEQ ID NO: 2103 - RNA, 17 nt, Artificial Sequence
  Synthetic Construct
aguuggccccuccucgc

SEQ ID NO: 2104 - RNA, 17 nt, Artificial Sequence
  Synthetic Construct
caguuggccccuccucg

SEQ ID NO: 2105 - RNA, 17 nt, Artificial Sequence
  Synthetic Construct
gcaguuggccccuccuc

SEQ ID NO: 2106 - RNA, 17 nt, Artificial Sequence
  Synthetic Construct
ugcaguuggccccuccu

SEQ ID NO: 2107 - RNA, 17 nt, Artificial Sequence
  Synthetic Construct
cugcaguuggccccucc

SEQ ID NO: 2108 - RNA, 17 nt, Artificial Sequence
  Synthetic Construct
ccugcaguuggccccuc

SEQ ID NO: 2109 - RNA, 17 nt, Artificial Sequence
  Synthetic Construct
accugcaguuggccccu

SEQ ID NO: 2110 - RNA, 17 nt, Artificial Sequence
  Synthetic Construct
caccugcaguuggcccc

SEQ ID NO: 2111 - RNA, 17 nt, Artificial Sequence
  Synthetic Construct
ucaccugcaguuggccc

SEQ ID NO: 2112 - RNA, 17 nt, Artificial Sequence
  Synthetic Construct
cucaccugcaguuggcc

SEQ ID NO: 2113 - RNA, 17 nt, Artificial Sequence
  Synthetic Construct
ccucaccugcaguuggc

SEQ ID NO: 2114 - RNA, 17 nt, Artificial Sequence
  Synthetic Construct
cccucaccugcaguugg

SEQ ID NO: 2115 - RNA, 17 nt, Artificial Sequence
  Synthetic Construct
ccccucaccugcaguug

SEQ ID NO: 2116 - RNA, 17 nt, Artificial Sequence
  Synthetic Construct
accccucaccugcaguu

SEQ ID NO: 2117 - RNA, 17 nt, Artificial Sequence
  Synthetic Construct
aaccccucaccugcagu

SEQ ID NO: 2118 - RNA, 17 nt, Artificial Sequence
  Synthetic Construct
aaaccccucaccugcag

SEQ ID NO: 2119 - RNA, 17 nt, Artificial Sequence
  Synthetic Construct
caaaccccucaccugca

SEQ ID NO: 2120 - RNA, 17 nt, Artificial Sequence
  Synthetic Construct
ucaaaccccucaccugc

SEQ ID NO: 2121 - RNA, 17 nt, Artificial Sequence
  Synthetic Construct
aucaaaccccucaccug

SEQ ID NO: 2122 - RNA, 17 nt, Artificial Sequence
  Synthetic Construct
uaucaaaccccucaccu

SEQ ID NO: 2123 - RNA, 17 nt, Artificial Sequence
  Synthetic Construct
uuaucaaaccccucacc

SEQ ID NO: 2124 - RNA, 17 nt, Artificial Sequence
  Synthetic Construct
uuuaucaaaccccucac

SEQ ID NO: 2125 - RNA, 17 nt, Artificial Sequence
  Synthetic Construct
cuuuaucaaaccccuca

SEQ ID NO: 2126 - RNA, 17 nt, Artificial Sequence
  Synthetic Construct
acuuuaucaaaccccuc

SEQ ID NO: 2127 - RNA, 17 nt, Artificial Sequence
  Synthetic Construct
gacuuuaucaaaccccu

SEQ ID NO: 2128 - RNA, 17 nt, Artificial Sequence
  Synthetic Construct
ugacuuuaucaaacccc

SEQ ID NO: 2129 - RNA, 17 nt, Artificial Sequence
  Synthetic Construct
cugacuuuaucaaaccc

SEQ ID NO: 2130 - RNA, 17 nt, Artificial Sequence
  Synthetic Construct
ccugacuuuaucaaacc

SEQ ID NO: 2131 - RNA, 17 nt, Artificial Sequence
  Synthetic Construct
cccugacuuuaucaaac

SEQ ID NO: 2132 - RNA, 17 nt, Artificial Sequence
  Synthetic Construct
ucccugacuuuaucaaa

SEQ ID NO: 2133 - RNA, 17 nt, Artificial Sequence
  Synthetic Construct
uucccugacuuuaucaa

SEQ ID NO: 2134 - RNA, 17 nt, Artificial Sequence
  Synthetic Construct
cuucccugacuuuauca

SEQ ID NO: 2135 - RNA, 17 nt, Artificial Sequence
  Synthetic Construct
gcuucccugacuuuauc

SEQ ID NO: 2136 - RNA, 17 nt, Artificial Sequence
  Synthetic Construct
ugcuucccugacuuuau

SEQ ID NO: 2137 - RNA, 17 nt, Artificial Sequence
  Synthetic Construct
cugcuucccugacuuua

SEQ ID NO: 2138 - RNA, 17 nt, Artificial Sequence
  Synthetic Construct
ucugcuucccugacuuu

SEQ ID NO: 2139 - RNA, 17 nt, Artificial Sequence
  Synthetic Construct
uucugcuucccugacuu

SEQ ID NO: 2140 - RNA, 17 nt, Artificial Sequence
  Synthetic Construct
cuucugcuucccugacu

SEQ ID NO: 2141 - RNA, 17 nt, Artificial Sequence
  Synthetic Construct
ucuucugcuucccugac

SEQ ID NO: 2142 - RNA, 17 nt, Artificial Sequence
  Synthetic Construct
aucuucugcuucccuga

SEQ ID NO: 2143 - RNA, 17 nt, Artificial Sequence
  Synthetic Construct
uaucuucugcuucccug

SEQ ID NO: 2144 - RNA, 17 nt, Artificial Sequence
  Synthetic Construct
cuaucuucugcuucccu

SEQ ID NO: 2145 - RNA, 17 nt, Artificial Sequence
  Synthetic Construct
gcuaucuucugcuuccc

SEQ ID NO: 2146 - RNA, 17 nt, Artificial Sequence
  Synthetic Construct
ggcuaucuucugcuucc

SEQ ID NO: 2147 - RNA, 17 nt, Artificial Sequence
  Synthetic Construct
gggcuaucuucugcuuc

SEQ ID NO: 2148 - RNA, 17 nt, Artificial Sequence
  Synthetic Construct
ggggcuaucuucugcuu

SEQ ID NO: 2149 - RNA, 17 nt, Artificial Sequence
  Synthetic Construct
gggggcuaucuucugcu

SEQ ID NO: 2150 - RNA, 17 nt, Artificial Sequence
  Synthetic Construct
ugggggcuaucuucugc

SEQ ID NO: 2151 - RNA, 17 nt, Artificial Sequence
  Synthetic Construct
uugggggcuaucuucug

SEQ ID NO: 2152 - RNA, 17 nt, Artificial Sequence
  Synthetic Construct
guugggggcuaucuucu

SEQ ID NO: 2153 - RNA, 17 nt, Artificial Sequence
  Synthetic Construct
uguugggggcuaucuuc

SEQ ID NO: 2154 - RNA, 17 nt, Artificial Sequence
  Synthetic Construct
guguugggggcuaucuu

SEQ ID NO: 2155 - RNA, 17 nt, Artificial Sequence
  Synthetic Construct
uguguugggggcuaucu

SEQ ID NO: 2156 - RNA, 17 nt, Artificial Sequence
  Synthetic Construct
auguguugggggcuauc

SEQ ID NO: 2157 - RNA, 17 nt, Artificial Sequence
  Synthetic Construct
cauguguugggggcuau

SEQ ID NO: 2158 - RNA, 17 nt, Artificial Sequence
  Synthetic Construct
acauguguugggggcua

SEQ ID NO: 2159 - RNA, 17 nt, Artificial Sequence
  Synthetic Construct
cacauguguugggggcu

SEQ ID NO: 2160 - RNA, 17 nt, Artificial Sequence
  Synthetic Construct
ucacauguguugggggc

SEQ ID NO: 2161 - RNA, 17 nt, Artificial Sequence
  Synthetic Construct
gucacauguguuggggg

SEQ ID NO: 2162 - RNA, 17 nt, Artificial Sequence
  Synthetic Construct
agucacauguguugggg

SEQ ID NO: 2163 - RNA, 17 nt, Artificial Sequence
  Synthetic Construct
cagucacauguguuggg

SEQ ID NO: 2164 - RNA, 17 nt, Artificial Sequence
  Synthetic Construct
ccagucacauguguugg

SEQ ID NO: 2165 - RNA, 17 nt, Artificial Sequence
  Synthetic Construct
cccagucacauguguug

SEQ ID NO: 2166 - RNA, 17 nt, Artificial Sequence
  Synthetic Construct
ccccagucacauguguu

SEQ ID NO: 2167 - RNA, 17 nt, Artificial Sequence
  Synthetic Construct
cccccagucacaugugu

SEQ ID NO: 2168 - RNA, 17 nt, Artificial Sequence
  Synthetic Construct
ccccccagucacaugug

SEQ ID NO: 2169 - RNA, 17 nt, Artificial Sequence
  Synthetic Construct
uccccccagucacaugu

SEQ ID NO: 2170 - RNA, 17 nt, Artificial Sequence
  Synthetic Construct
auccccccagucacaug

SEQ ID NO: 2171 - RNA, 17 nt, Artificial Sequence
  Synthetic Construct
cauccccccagucacau

SEQ ID NO: 2172 - RNA, 17 nt, Artificial Sequence
  Synthetic Construct
ccauccccccagucaca

SEQ ID NO: 2173 - RNA, 17 nt, Artificial Sequence
  Synthetic Construct
accauccccccagucac

SEQ ID NO: 2174 - RNA, 17 nt, Artificial Sequence
  Synthetic Construct
gaccauccccccaguca

SEQ ID NO: 2175 - RNA, 17 nt, Artificial Sequence
  Synthetic Construct
ugaccauccccccaguc

SEQ ID NO: 2176 - RNA, 17 nt, Artificial Sequence
  Synthetic Construct
uugaccauccccccagu

SEQ ID NO: 2177 - RNA, 17 nt, Artificial Sequence
  Synthetic Construct
guugaccauccccccag

SEQ ID NO: 2178 - RNA, 17 nt, Artificial Sequence
  Synthetic Construct
uguugaccaucccccca

SEQ ID NO: 2179 - RNA, 17 nt, Artificial Sequence
  Synthetic Construct
uuguugaccaucccccc

SEQ ID NO: 2180 - RNA, 17 nt, Artificial Sequence
  Synthetic Construct
cuuguugaccauccccc

SEQ ID NO: 2181 - RNA, 17 nt, Artificial Sequence
  Synthetic Construct
ucuuguugaccaucccc

SEQ ID NO: 2182 - RNA, 17 nt, Artificial Sequence
  Synthetic Construct
uucuuguugaccauccc

SEQ ID NO: 2183 - RNA, 17 nt, Artificial Sequence
  Synthetic Construct
uuucuuguugaccaucc

SEQ ID NO: 2184 - RNA, 17 nt, Artificial Sequence
  Synthetic Construct
cuuucuuguugaccauc

SEQ ID NO: 2185 - RNA, 17 nt, Artificial Sequence
  Synthetic Construct
ccuuucuuguugaccau

SEQ ID NO: 2186 - RNA, 17 nt, Artificial Sequence
  Synthetic Construct
uccuuucuuguugacca

SEQ ID NO: 2187 - RNA, 17 nt, Artificial Sequence
  Synthetic Construct
uuccuuucuuguugacc

SEQ ID NO: 2188 - RNA, 17 nt, Artificial Sequence
  Synthetic Construct
auuccuuucuuguugac

SEQ ID NO: 2189 - RNA, 17 nt, Artificial Sequence
  Synthetic Construct
cauuccuuucuuguuga

SEQ ID NO: 2190 - RNA, 17 nt, Artificial Sequence
  Synthetic Construct
ccauuccuuucuuguug

SEQ ID NO: 2191 - RNA, 17 nt, Artificial Sequence
  Synthetic Construct
accauuccuuucuuguu

SEQ ID NO: 2192 - RNA, 17 nt, Artificial Sequence
  Synthetic Construct
caccauuccuuucuugu

SEQ ID NO: 2193 - RNA, 17 nt, Artificial Sequence
  Synthetic Construct
ucaccauuccuuucuug

SEQ ID NO: 2194 - RNA, 17 nt, Artificial Sequence
  Synthetic Construct
cucaccauuccuuucuu

SEQ ID NO: 2195 - RNA, 17 nt, Artificial Sequence
  Synthetic Construct
acucaccauuccuuucu

SEQ ID NO: 2196 - RNA, 17 nt, Artificial Sequence
  Synthetic Construct
cacucaccauuccuuuc

SEQ ID NO: 2197 - RNA, 17 nt, Artificial Sequence
  Synthetic Construct
ccacucaccauuccuuu

SEQ ID NO: 2198 - RNA, 17 nt, Artificial Sequence
  Synthetic Construct
accacucaccauuccuu

SEQ ID NO: 2199 - RNA, 17 nt, Artificial Sequence
  Synthetic Construct
caccacucaccauuccu

SEQ ID NO: 2200 - RNA, 17 nt, Artificial Sequence
  Synthetic Construct
ccaccacucaccauucc

SEQ ID NO: 2201 - RNA, 17 nt, Artificial Sequence
  Synthetic Construct
accaccacucaccauuc

SEQ ID NO: 2202 - RNA, 17 nt, Artificial Sequence
  Synthetic Construct
caccaccacucaccauu

SEQ ID NO: 2203 - RNA, 17 nt, Artificial Sequence
  Synthetic Construct
ccaccaccacucaccau

SEQ ID NO: 2204 - RNA, 17 nt, Artificial Sequence
  Synthetic Construct
gccaccaccacucacca

SEQ ID NO: 2205 - RNA, 17 nt, Artificial Sequence
  Synthetic Construct
agccaccaccacucacc

SEQ ID NO: 2206 - RNA, 17 nt, Artificial Sequence
  Synthetic Construct
cagccaccaccacucac

SEQ ID NO: 2207 - RNA, 17 nt, Artificial Sequence
  Synthetic Construct
acagccaccaccacuca

SEQ ID NO: 2208 - RNA, 17 nt, Artificial Sequence
  Synthetic Construct
cacagccaccaccacuc

SEQ ID NO: 2209 - RNA, 17 nt, Artificial Sequence
  Synthetic Construct
gcacagccaccaccacu

SEQ ID NO: 2210 - RNA, 17 nt, Artificial Sequence
  Synthetic Construct
agcacagccaccaccac

SEQ ID NO: 2211 - RNA, 17 nt, Artificial Sequence
  Synthetic Construct
gagcacagccaccacca

SEQ ID NO: 2212 - RNA, 17 nt, Artificial Sequence
  Synthetic Construct
agagcacagccaccacc

SEQ ID NO: 2213 - RNA, 17 nt, Artificial Sequence
  Synthetic Construct
gagagcacagccaccac

SEQ ID NO: 2214 - RNA, 17 nt, Artificial Sequence
  Synthetic Construct
ugagagcacagccacca

SEQ ID NO: 2215 - RNA, 17 nt, Artificial Sequence
  Synthetic Construct
uugagagcacagccacc

SEQ ID NO: 2216 - RNA, 17 nt, Artificial Sequence
  Synthetic Construct
auugagagcacagccac

SEQ ID NO: 2217 - RNA, 17 nt, Artificial Sequence
  Synthetic Construct
aauugagagcacagcca

SEQ ID NO: 2218 - RNA, 17 nt, Artificial Sequence
  Synthetic Construct
aaauugagagcacagcc

SEQ ID NO: 2219 - RNA, 17 nt, Artificial Sequence
  Synthetic Construct
aaaauugagagcacagc

SEQ ID NO: 2220 - RNA, 17 nt, Artificial Sequence
  Synthetic Construct
gaaaauugagagcacag

SEQ ID NO: 2221 - RNA, 17 nt, Artificial Sequence
  Synthetic Construct
ggaaaauugagagcaca

SEQ ID NO: 2222 - RNA, 17 nt, Artificial Sequence
  Synthetic Construct
gggaaaauugagagcac

SEQ ID NO: 2223 - RNA, 17 nt, Artificial Sequence
  Synthetic Construct
agggaaaauugagagca

SEQ ID NO: 2224 - RNA, 17 nt, Artificial Sequence
  Synthetic Construct
cagggaaaauugagagc

SEQ ID NO: 2225 - RNA, 17 nt, Artificial Sequence
  Synthetic Construct
acagggaaaauugagag

SEQ ID NO: 2226 - RNA, 17 nt, Artificial Sequence
  Synthetic Construct
gacagggaaaauugaga

SEQ ID NO: 2227 - RNA, 17 nt, Artificial Sequence
  Synthetic Construct
agacagggaaaauugag

SEQ ID NO: 2228 - RNA, 17 nt, Artificial Sequence
  Synthetic Construct
gagacagggaaaauuga

SEQ ID NO: 2229 - RNA, 17 nt, Artificial Sequence
  Synthetic Construct
ggagacagggaaaauug

SEQ ID NO: 2230 - RNA, 17 nt, Artificial Sequence
  Synthetic Construct
cggagacagggaaaauu

SEQ ID NO: 2231 - RNA, 17 nt, Artificial Sequence
  Synthetic Construct
acggagacagggaaaau

SEQ ID NO: 2232 - RNA, 17 nt, Artificial Sequence
  Synthetic Construct
uacggagacagggaaaa

SEQ ID NO: 2233 - RNA, 17 nt, Artificial Sequence
  Synthetic Construct
guacggagacagggaaa

SEQ ID NO: 2234 - RNA, 17 nt, Artificial Sequence
  Synthetic Construct
uguacggagacagggaa

SEQ ID NO: 2235 - RNA, 17 nt, Artificial Sequence
  Synthetic Construct
cuguacggagacaggga

SEQ ID NO: 2236 - RNA, 17 nt, Artificial Sequence
  Synthetic Construct
ccuguacggagacaggg

SEQ ID NO: 2237 - RNA, 17 nt, Artificial Sequence
  Synthetic Construct
gccuguacggagacagg

SEQ ID NO: 2238 - RNA, 17 nt, Artificial Sequence
  Synthetic Construct
agccuguacggagacag

SEQ ID NO: 2239 - RNA, 17 nt, Artificial Sequence
  Synthetic Construct
gagccuguacggagaca

SEQ ID NO: 2240 - RNA, 17 nt, Artificial Sequence
  Synthetic Construct
agagccuguacggagac

SEQ ID NO: 2241 - RNA, 17 nt, Artificial Sequence
  Synthetic Construct
cagagccuguacggaga

SEQ ID NO: 2242 - RNA, 17 nt, Artificial Sequence
  Synthetic Construct
acagagccuguacggag

SEQ ID NO: 2243 - RNA, 17 nt, Artificial Sequence
  Synthetic Construct
cacagagccuguacgga

SEQ ID NO: 2244 - RNA, 17 nt, Artificial Sequence
  Synthetic Construct
ccacagagccuguacgg

SEQ ID NO: 2245 - RNA, 17 nt, Artificial Sequence
  Synthetic Construct
cccacagagccuguacg

SEQ ID NO: 2246 - RNA, 17 nt, Artificial Sequence
  Synthetic Construct
ucccacagagccuguac

SEQ ID NO: 2247 - RNA, 17 nt, Artificial Sequence
  Synthetic Construct
cucccacagagccugua

SEQ ID NO: 2248 - RNA, 17 nt, Artificial Sequence
  Synthetic Construct
ccucccacagagccugu

SEQ ID NO: 2249 - RNA, 17 nt, Artificial Sequence
  Synthetic Construct
uccucccacagagccug

SEQ ID NO: 2250 - RNA, 17 nt, Artificial Sequence
  Synthetic Construct
auccucccacagagccu

SEQ ID NO: 2251 - RNA, 17 nt, Artificial Sequence
  Synthetic Construct
gauccucccacagagcc

SEQ ID NO: 2252 - RNA, 17 nt, Artificial Sequence
  Synthetic Construct
ugauccucccacagagc

SEQ ID NO: 2253 - RNA, 17 nt, Artificial Sequence
  Synthetic Construct
cugauccucccacagag

SEQ ID NO: 2254 - RNA, 17 nt, Artificial Sequence
  Synthetic Construct
ccugauccucccacaga

SEQ ID NO: 2255 - RNA, 17 nt, Artificial Sequence
  Synthetic Construct
cccugauccucccacag

SEQ ID NO: 2256 - RNA, 17 nt, Artificial Sequence
  Synthetic Construct
gcccugauccucccaca

SEQ ID NO: 2257 - RNA, 17 nt, Artificial Sequence
  Synthetic Construct
agcccugauccucccac

SEQ ID NO: 2258 - RNA, 17 nt, Artificial Sequence
  Synthetic Construct
cagcccugauccuccca

SEQ ID NO: 2259 - RNA, 17 nt, Artificial Sequence
  Synthetic Construct
ccagcccugauccuccc

SEQ ID NO: 2260 - RNA, 17 nt, Artificial Sequence
  Synthetic Construct
cccagcccugauccucc

SEQ ID NO: 2261 - RNA, 17 nt, Artificial Sequence
  Synthetic Construct
ucccagcccugauccuc

SEQ ID NO: 2262 - RNA, 17 nt, Artificial Sequence
  Synthetic Construct
uucccagcccugauccu

SEQ ID NO: 2263 - RNA, 17 nt, Artificial Sequence
  Synthetic Construct
guucccagcccugaucc

SEQ ID NO: 2264 - RNA, 17 nt, Artificial Sequence
  Synthetic Construct
aguucccagcccugauc

SEQ ID NO: 2265 - RNA, 17 nt, Artificial Sequence
  Synthetic Construct
gaguucccagcccugau

SEQ ID NO: 2266 - RNA, 17 nt, Artificial Sequence
  Synthetic Construct
agaguucccagcccuga

SEQ ID NO: 2267 - RNA, 17 nt, Artificial Sequence
  Synthetic Construct
uagaguucccagcccug

SEQ ID NO: 2268 - RNA, 17 nt, Artificial Sequence
  Synthetic Construct
cuagaguucccagcccu

SEQ ID NO: 2269 - RNA, 17 nt, Artificial Sequence
  Synthetic Construct
gcuagaguucccagccc

SEQ ID NO: 2270 - RNA, 17 nt, Artificial Sequence
  Synthetic Construct
ggcuagaguucccagcc

SEQ ID NO: 2271 - RNA, 17 nt, Artificial Sequence
  Synthetic Construct
gggcuagaguucccagc

SEQ ID NO: 2272 - RNA, 17 nt, Artificial Sequence
  Synthetic Construct
agggcuagaguucccag

SEQ ID NO: 2273 - RNA, 17 nt, Artificial Sequence
  Synthetic Construct
cagggcuagaguuccca

SEQ ID NO: 2274 - RNA, 17 nt, Artificial Sequence
  Synthetic Construct
ccagggcuagaguuccc

SEQ ID NO: 2275 - RNA, 17 nt, Artificial Sequence
  Synthetic Construct
gccagggcuagaguucc

SEQ ID NO: 2276 - RNA, 17 nt, Artificial Sequence
  Synthetic Construct
ggccagggcuagaguuc

SEQ ID NO: 2277 - RNA, 17 nt, Artificial Sequence
  Synthetic Construct
gggccagggcuagaguu

SEQ ID NO: 2278 - RNA, 17 nt, Artificial Sequence
  Synthetic Construct
agggccagggcuagagu

SEQ ID NO: 2279 - RNA, 17 nt, Artificial Sequence
  Synthetic Construct
cagggccagggcuagag

SEQ ID NO: 2280 - RNA, 17 nt, Artificial Sequence
  Synthetic Construct
ccagggccagggcuaga

SEQ ID NO: 2281 - RNA, 17 nt, Artificial Sequence
  Synthetic Construct
cccagggccagggcuag

SEQ ID NO: 2282 - RNA, 17 nt, Artificial Sequence
  Synthetic Construct
ccccagggccagggcua

SEQ ID NO: 2283 - RNA, 17 nt, Artificial Sequence
  Synthetic Construct
uccccagggccagggcu

SEQ ID NO: 2284 - RNA, 17 nt, Artificial Sequence
  Synthetic Construct
auccccagggccagggc

SEQ ID NO: 2285 - RNA, 17 nt, Artificial Sequence
  Synthetic Construct
gauccccagggccaggg

SEQ ID NO: 2286 - RNA, 17 nt, Artificial Sequence
  Synthetic Construct
ggauccccagggccagg

SEQ ID NO: 2287 - RNA, 17 nt, Artificial Sequence
  Synthetic Construct
aggauccccagggccag

SEQ ID NO: 2288 - RNA, 17 nt, Artificial Sequence
  Synthetic Construct
caggauccccagggcca

SEQ ID NO: 2289 - RNA, 17 nt, Artificial Sequence
  Synthetic Construct
ccaggauccccagggcc

SEQ ID NO: 2290 - RNA, 17 nt, Artificial Sequence
  Synthetic Construct
cccaggauccccagggc

SEQ ID NO: 2291 - RNA, 17 nt, Artificial Sequence
  Synthetic Construct
ucccaggauccccaggg

SEQ ID NO: 2292 - RNA, 17 nt, Artificial Sequence
  Synthetic Construct
cucccaggauccccagg

SEQ ID NO: 2293 - RNA, 17 nt, Artificial Sequence
  Synthetic Construct
ccucccaggauccccag

SEQ ID NO: 2294 - RNA, 17 nt, Artificial Sequence
  Synthetic Construct
gccucccaggaucccca

SEQ ID NO: 2295 - RNA, 17 nt, Artificial Sequence
  Synthetic Construct
ggccucccaggaucccc

SEQ ID NO: 2296 - RNA, 17 nt, Artificial Sequence
  Synthetic Construct
aggccucccaggauccc

SEQ ID NO: 2297 - RNA, 17 nt, Artificial Sequence
  Synthetic Construct
caggccucccaggaucc

SEQ ID NO: 2298 - RNA, 17 nt, Artificial Sequence
  Synthetic Construct
ccaggccucccaggauc

SEQ ID NO: 2299 - RNA, 17 nt, Artificial Sequence
  Synthetic Construct
cccaggccucccaggau

SEQ ID NO: 2300 - RNA, 17 nt, Artificial Sequence
  Synthetic Construct
ccccaggccucccagga

SEQ ID NO: 2301 - RNA, 17 nt, Artificial Sequence
  Synthetic Construct
uccccaggccucccagg

SEQ ID NO: 2302 - RNA, 17 nt, Artificial Sequence
  Synthetic Construct
guccccaggccucccag

SEQ ID NO: 2303 - RNA, 17 nt, Artificial Sequence
  Synthetic Construct
uguccccaggccuccca

SEQ ID NO: 2304 - RNA, 17 nt, Artificial Sequence
  Synthetic Construct
cuguccccaggccuccc

SEQ ID NO: 2305 - RNA, 17 nt, Artificial Sequence
  Synthetic Construct
gcuguccccaggccucc

SEQ ID NO: 2306 - RNA, 17 nt, Artificial Sequence
  Synthetic Construct
ggcuguccccaggccuc

SEQ ID NO: 2307 - RNA, 17 nt, Artificial Sequence
  Synthetic Construct
cggcuguccccaggccu

SEQ ID NO: 2308 - RNA, 17 nt, Artificial Sequence
  Synthetic Construct
gcggcuguccccaggcc

SEQ ID NO: 2309 - RNA, 17 nt, Artificial Sequence
  Synthetic Construct
ggcggcuguccccaggc

SEQ ID NO: 2310 - RNA, 17 nt, Artificial Sequence
  Synthetic Construct
gggcggcuguccccagg

SEQ ID NO: 2311 - RNA, 17 nt, Artificial Sequence
  Synthetic Construct
agggcggcuguccccag

SEQ ID NO: 2312 - RNA, 17 nt, Artificial Sequence
  Synthetic Construct
cagggcggcugucccca

SEQ ID NO: 2313 - RNA, 17 nt, Artificial Sequence
  Synthetic Construct
gcagggcggcugucccc

SEQ ID NO: 2314 - RNA, 17 nt, Artificial Sequence
  Synthetic Construct
agcagggcggcuguccc

SEQ ID NO: 2315 - RNA, 17 nt, Artificial Sequence
  Synthetic Construct
gagcagggcggcugucc

SEQ ID NO: 2316 - RNA, 17 nt, Artificial Sequence
  Synthetic Construct
ugagcagggcggcuguc

SEQ ID NO: 2317 - RNA, 17 nt, Artificial Sequence
  Synthetic Construct
augagcagggcggcugu

SEQ ID NO: 2318 - RNA, 17 nt, Artificial Sequence
  Synthetic Construct
aaugagcagggcggcug

SEQ ID NO: 2319 - RNA, 17 nt, Artificial Sequence
  Synthetic Construct
caaugagcagggcggcu

SEQ ID NO: 2320 - RNA, 17 nt, Artificial Sequence
  Synthetic Construct
ccaaugagcagggcggc

SEQ ID NO: 2321 - RNA, 17 nt, Artificial Sequence
  Synthetic Construct
cccaaugagcagggcgg

SEQ ID NO: 2322 - RNA, 17 nt, Artificial Sequence
  Synthetic Construct
ccccaaugagcagggcg

SEQ ID NO: 2323 - RNA, 17 nt, Artificial Sequence
  Synthetic Construct
accccaaugagcagggc

SEQ ID NO: 2324 - RNA, 17 nt, Artificial Sequence
  Synthetic Construct
gaccccaaugagcaggg

SEQ ID NO: 2325 - RNA, 17 nt, Artificial Sequence
  Synthetic Construct
ugaccccaaugagcagg

SEQ ID NO: 2326 - RNA, 17 nt, Artificial Sequence
  Synthetic Construct
augaccccaaugagcag

SEQ ID NO: 2327 - RNA, 17 nt, Artificial Sequence
  Synthetic Construct
gaugaccccaaugagca

SEQ ID NO: 2328 - RNA, 17 nt, Artificial Sequence
  Synthetic Construct
agaugaccccaaugagc

SEQ ID NO: 2329 - RNA, 17 nt, Artificial Sequence
  Synthetic Construct
aagaugaccccaaugag

SEQ ID NO: 2330 - RNA, 17 nt, Artificial Sequence
  Synthetic Construct
caagaugaccccaauga

SEQ ID NO: 2331 - RNA, 17 nt, Artificial Sequence
  Synthetic Construct
acaagaugaccccaaug

SEQ ID NO: 2332 - RNA, 17 nt, Artificial Sequence
  Synthetic Construct
cacaagaugaccccaau

SEQ ID NO: 2333 - RNA, 17 nt, Artificial Sequence
  Synthetic Construct
ccacaagaugaccccaa

SEQ ID NO: 2334 - RNA, 17 nt, Artificial Sequence
  Synthetic Construct
gccacaagaugacccca

SEQ ID NO: 2335 - RNA, 17 nt, Artificial Sequence
  Synthetic Construct
ugccacaagaugacccc

SEQ ID NO: 2336 - RNA, 17 nt, Artificial Sequence
  Synthetic Construct
uugccacaagaugaccc

SEQ ID NO: 2337 - RNA, 17 nt, Artificial Sequence
  Synthetic Construct
uuugccacaagaugacc

SEQ ID NO: 2338 - RNA, 17 nt, Artificial Sequence
  Synthetic Construct
cuuugccacaagaugac

SEQ ID NO: 2339 - RNA, 17 nt, Artificial Sequence
  Synthetic Construct
ccuuugccacaagauga

SEQ ID NO: 2340 - RNA, 17 nt, Artificial Sequence
  Synthetic Construct
gccuuugccacaagaug

SEQ ID NO: 2341 - RNA, 17 nt, Artificial Sequence
  Synthetic Construct
cgccuuugccacaagau

SEQ ID NO: 2342 - RNA, 17 nt, Artificial Sequence
  Synthetic Construct
ccgccuuugccacaaga

SEQ ID NO: 2343 - RNA, 17 nt, Artificial Sequence
  Synthetic Construct
gccgccuuugccacaag

SEQ ID NO: 2344 - RNA, 17 nt, Artificial Sequence
  Synthetic Construct
ugccgccuuugccacaa

SEQ ID NO: 2345 - RNA, 17 nt, Artificial Sequence
  Synthetic Construct
uugccgccuuugccaca

SEQ ID NO: 2346 - RNA, 17 nt, Artificial Sequence
  Synthetic Construct
guugccgccuuugccac

SEQ ID NO: 2347 - RNA, 17 nt, Artificial Sequence
  Synthetic Construct
cguugccgccuuugcca

SEQ ID NO: 2348 - RNA, 17 nt, Artificial Sequence
  Synthetic Construct
gcguugccgccuuugcc

SEQ ID NO: 2349 - RNA, 17 nt, Artificial Sequence
  Synthetic Construct
ggcguugccgccuuugc

SEQ ID NO: 2350 - RNA, 17 nt, Artificial Sequence
  Synthetic Construct
cggcguugccgccuuug

SEQ ID NO: 2351 - RNA, 17 nt, Artificial Sequence
  Synthetic Construct
ucggcguugccgccuuu

SEQ ID NO: 2352 - RNA, 17 nt, Artificial Sequence
  Synthetic Construct
cucggcguugccgccuu

SEQ ID NO: 2353 - RNA, 17 nt, Artificial Sequence
  Synthetic Construct
ccucggcguugccgccu

SEQ ID NO: 2354 - RNA, 17 nt, Artificial Sequence
  Synthetic Construct
uccucggcguugccgcc

SEQ ID NO: 2355 - RNA, 17 nt, Artificial Sequence
  Synthetic Construct
cuccucggcguugccgc

SEQ ID NO: 2356 - RNA, 17 nt, Artificial Sequence
  Synthetic Construct
ucuccucggcguugccg

SEQ ID NO: 2357 - RNA, 17 nt, Artificial Sequence
  Synthetic Construct
cucuccucggcguugcc

SEQ ID NO: 2358 - RNA, 17 nt, Artificial Sequence
  Synthetic Construct
ccucuccucggcguugc

SEQ ID NO: 2359 - RNA, 17 nt, Artificial Sequence
  Synthetic Construct
uccucuccucggcguug

SEQ ID NO: 2360 - RNA, 17 nt, Artificial Sequence
  Synthetic Construct
cuccucuccucggcguu

SEQ ID NO: 2361 - RNA, 17 nt, Artificial Sequence
  Synthetic Construct
ucuccucuccucggcgu

SEQ ID NO: 2362 - RNA, 17 nt, Artificial Sequence
  Synthetic Construct
cucuccucuccucggcg

SEQ ID NO: 2363 - RNA, 16 nt, Artificial Sequence
  Synthetic Construct
cccuccucgccugguu

SEQ ID NO: 2364 - RNA, 16 nt, Artificial Sequence
  Synthetic Construct
ccccuccucgccuggu

SEQ ID NO: 2365 - RNA, 16 nt, Artificial Sequence
  Synthetic Construct
gccccuccucgccugg

SEQ ID NO: 2366 - RNA, 16 nt, Artificial Sequence
  Synthetic Construct
ggccccuccucgccug

SEQ ID NO: 2367 - RNA, 16 nt, Artificial Sequence
  Synthetic Construct
uggccccuccucgccu

SEQ ID NO: 2368 - RNA, 16 nt, Artificial Sequence
  Synthetic Construct
uuggccccuccucgcc

SEQ ID NO: 2369 - RNA, 16 nt, Artificial Sequence
  Synthetic Construct
guuggccccuccucgc

SEQ ID NO: 2370 - RNA, 16 nt, Artificial Sequence
  Synthetic Construct
aguuggccccuccucg

SEQ ID NO: 2371 - RNA, 16 nt, Artificial Sequence
  Synthetic Construct
caguuggccccuccuc

SEQ ID NO: 2372 - RNA, 16 nt, Artificial Sequence
  Synthetic Construct
gcaguuggccccuccu

SEQ ID NO: 2373 - RNA, 16 nt, Artificial Sequence
  Synthetic Construct
ugcaguuggccccucc

SEQ ID NO: 2374 - RNA, 16 nt, Artificial Sequence
  Synthetic Construct
cugcaguuggccccuc

SEQ ID NO: 2375 - RNA, 16 nt, Artificial Sequence
  Synthetic Construct
ccugcaguuggccccu

SEQ ID NO: 2376 - RNA, 16 nt, Artificial Sequence
  Synthetic Construct
accugcaguuggcccc

SEQ ID NO: 2377 - RNA, 16 nt, Artificial Sequence
  Synthetic Construct
caccugcaguuggccc

SEQ ID NO: 2378 - RNA, 16 nt, Artificial Sequence
  Synthetic Construct
ucaccugcaguuggcc

SEQ ID NO: 2379 - RNA, 16 nt, Artificial Sequence
  Synthetic Construct
cucaccugcaguuggc

SEQ ID NO: 2380 - RNA, 16 nt, Artificial Sequence
  Synthetic Construct
ccucaccugcaguugg

SEQ ID NO: 2381 - RNA, 16 nt, Artificial Sequence
  Synthetic Construct
cccucaccugcaguug

SEQ ID NO: 2382 - RNA, 16 nt, Artificial Sequence
  Synthetic Construct
ccccucaccugcaguu

SEQ ID NO: 2383 - RNA, 16 nt, Artificial Sequence
  Synthetic Construct
accccucaccugcagu

SEQ ID NO: 2384 - RNA, 16 nt, Artificial Sequence
  Synthetic Construct
aaccccucaccugcag

SEQ ID NO: 2385 - RNA, 16 nt, Artificial Sequence
  Synthetic Construct
aaaccccucaccugca

SEQ ID NO: 2386 - RNA, 16 nt, Artificial Sequence
  Synthetic Construct
caaaccccucaccugc

SEQ ID NO: 2387 - RNA, 16 nt, Artificial Sequence
  Synthetic Construct
ucaaaccccucaccug

SEQ ID NO: 2388 - RNA, 16 nt, Artificial Sequence
  Synthetic Construct
aucaaaccccucaccu

SEQ ID NO: 2389 - RNA, 16 nt, Artificial Sequence
  Synthetic Construct
uaucaaaccccucacc

SEQ ID NO: 2390 - RNA, 16 nt, Artificial Sequence
  Synthetic Construct
uuaucaaaccccucac

SEQ ID NO: 2391 - RNA, 16 nt, Artificial Sequence
  Synthetic Construct
uuuaucaaaccccuca

SEQ ID NO: 2392 - RNA, 16 nt, Artificial Sequence
  Synthetic Construct
cuuuaucaaaccccuc

SEQ ID NO: 2393 - RNA, 16 nt, Artificial Sequence
  Synthetic Construct
acuuuaucaaaccccu

SEQ ID NO: 2394 - RNA, 16 nt, Artificial Sequence
  Synthetic Construct
gacuuuaucaaacccc

SEQ ID NO: 2395 - RNA, 16 nt, Artificial Sequence
  Synthetic Construct
ugacuuuaucaaaccc

SEQ ID NO: 2396 - RNA, 16 nt, Artificial Sequence
  Synthetic Construct
cugacuuuaucaaacc

SEQ ID NO: 2397 - RNA, 16 nt, Artificial Sequence
  Synthetic Construct
ccugacuuuaucaaac

SEQ ID NO: 2398 - RNA, 16 nt, Artificial Sequence
  Synthetic Construct
cccugacuuuaucaaa

SEQ ID NO: 2399 - RNA, 16 nt, Artificial Sequence
  Synthetic Construct
ucccugacuuuaucaa

SEQ ID NO: 2400 - RNA, 16 nt, Artificial Sequence
  Synthetic Construct
uucccugacuuuauca

SEQ ID NO: 2401 - RNA, 16 nt, Artificial Sequence
  Synthetic Construct
cuucccugacuuuauc

SEQ ID NO: 2402 - RNA, 16 nt, Artificial Sequence
  Synthetic Construct
gcuucccugacuuuau

SEQ ID NO: 2403 - RNA, 16 nt, Artificial Sequence
  Synthetic Construct
ugcuucccugacuuua

SEQ ID NO: 2404 - RNA, 16 nt, Artificial Sequence
  Synthetic Construct
cugcuucccugacuuu

SEQ ID NO: 2405 - RNA, 16 nt, Artificial Sequence
  Synthetic Construct
ucugcuucccugacuu

SEQ ID NO: 2406 - RNA, 16 nt, Artificial Sequence
  Synthetic Construct
uucugcuucccugacu

SEQ ID NO: 2407 - RNA, 16 nt, Artificial Sequence
  Synthetic Construct
cuucugcuucccugac

SEQ ID NO: 2408 - RNA, 16 nt, Artificial Sequence
  Synthetic Construct
ucuucugcuucccuga

SEQ ID NO: 2409 - RNA, 16 nt, Artificial Sequence
  Synthetic Construct
aucuucugcuucccug

SEQ ID NO: 2410 - RNA, 16 nt, Artificial Sequence
  Synthetic Construct
uaucuucugcuucccu

SEQ ID NO: 2411 - RNA, 16 nt, Artificial Sequence
  Synthetic Construct
cuaucuucugcuuccc

SEQ ID NO: 2412 - RNA, 16 nt, Artificial Sequence
  Synthetic Construct
gcuaucuucugcuucc

SEQ ID NO: 2413 - RNA, 16 nt, Artificial Sequence
  Synthetic Construct
ggcuaucuucugcuuc

SEQ ID NO: 2414 - RNA, 16 nt, Artificial Sequence
  Synthetic Construct
gggcuaucuucugcuu

SEQ ID NO: 2415 - RNA, 16 nt, Artificial Sequence
  Synthetic Construct
ggggcuaucuucugcu

SEQ ID NO: 2416 - RNA, 16 nt, Artificial Sequence
  Synthetic Construct
gggggcuaucuucugc

SEQ ID NO: 2417 - RNA, 16 nt, Artificial Sequence
  Synthetic Construct
ugggggcuaucuucug

SEQ ID NO: 2418 - RNA, 16 nt, Artificial Sequence
  Synthetic Construct
uugggggcuaucuucu

SEQ ID NO: 2419 - RNA, 16 nt, Artificial Sequence
  Synthetic Construct
guugggggcuaucuuc

SEQ ID NO: 2420 - RNA, 16 nt, Artificial Sequence
  Synthetic Construct
uguugggggcuaucuu

SEQ ID NO: 2421 - RNA, 16 nt, Artificial Sequence
  Synthetic Construct
guguugggggcuaucu

SEQ ID NO: 2422 - RNA, 16 nt, Artificial Sequence
  Synthetic Construct
uguguugggggcuauc

SEQ ID NO: 2423 - RNA, 16 nt, Artificial Sequence
  Synthetic Construct
auguguugggggcuau

SEQ ID NO: 2424 - RNA, 16 nt, Artificial Sequence
  Synthetic Construct
cauguguugggggcua

SEQ ID NO: 2425 - RNA, 16 nt, Artificial Sequence
  Synthetic Construct
acauguguugggggcu

SEQ ID NO: 2426 - RNA, 16 nt, Artificial Sequence
  Synthetic Construct
cacauguguugggggc

SEQ ID NO: 2427 - RNA, 16 nt, Artificial Sequence
  Synthetic Construct
ucacauguguuggggg

SEQ ID NO: 2428 - RNA, 16 nt, Artificial Sequence
  Synthetic Construct
gucacauguguugggg

SEQ ID NO: 2429 - RNA, 16 nt, Artificial Sequence
  Synthetic Construct
agucacauguguuggg

SEQ ID NO: 2430 - RNA, 16 nt, Artificial Sequence
  Synthetic Construct
cagucacauguguugg

SEQ ID NO: 2431 - RNA, 16 nt, Artificial Sequence
  Synthetic Construct
ccagucacauguguug

SEQ ID NO: 2432 - RNA, 16 nt, Artificial Sequence
  Synthetic Construct
cccagucacauguguu

SEQ ID NO: 2433 - RNA, 16 nt, Artificial Sequence
  Synthetic Construct
ccccagucacaugugu

SEQ ID NO: 2434 - RNA, 16 nt, Artificial Sequence
  Synthetic Construct
cccccagucacaugug

SEQ ID NO: 2435 - RNA, 16 nt, Artificial Sequence
  Synthetic Construct
ccccccagucacaugu

SEQ ID NO: 2436 - RNA, 16 nt, Artificial Sequence
  Synthetic Construct
uccccccagucacaug

SEQ ID NO: 2437 - RNA, 16 nt, Artificial Sequence
  Synthetic Construct
auccccccagucacau

SEQ ID NO: 2438 - RNA, 16 nt, Artificial Sequence
  Synthetic Construct
cauccccccagucaca

SEQ ID NO: 2439 - RNA, 16 nt, Artificial Sequence
  Synthetic Construct
ccauccccccagucac

SEQ ID NO: 2440 - RNA, 16 nt, Artificial Sequence
  Synthetic Construct
accauccccccaguca

SEQ ID NO: 2441 - RNA, 16 nt, Artificial Sequence
  Synthetic Construct
gaccauccccccaguc

SEQ ID NO: 2442 - RNA, 16 nt, Artificial Sequence
  Synthetic Construct
ugaccauccccccagu

SEQ ID NO: 2443 - RNA, 16 nt, Artificial Sequence
  Synthetic Construct
uugaccauccccccag

SEQ ID NO: 2444 - RNA, 16 nt, Artificial Sequence
  Synthetic Construct
guugaccaucccccca

SEQ ID NO: 2445 - RNA, 16 nt, Artificial Sequence
  Synthetic Construct
uguugaccaucccccc

SEQ ID NO: 2446 - RNA, 16 nt, Artificial Sequence
  Synthetic Construct
uuguugaccauccccc

SEQ ID NO: 2447 - RNA, 16 nt, Artificial Sequence
  Synthetic Construct
cuuguugaccaucccc

SEQ ID NO: 2448 - RNA, 16 nt, Artificial Sequence
  Synthetic Construct
ucuuguugaccauccc

SEQ ID NO: 2449 - RNA, 16 nt, Artificial Sequence
  Synthetic Construct
uucuuguugaccaucc

SEQ ID NO: 2450 - RNA, 16 nt, Artificial Sequence
  Synthetic Construct
uuucuuguugaccauc

SEQ ID NO: 2451 - RNA, 16 nt, Artificial Sequence
  Synthetic Construct
cuuucuuguugaccau

SEQ ID NO: 2452 - RNA, 16 nt, Artificial Sequence
  Synthetic Construct
ccuuucuuguugacca

SEQ ID NO: 2453 - RNA, 16 nt, Artificial Sequence
  Synthetic Construct
uccuuucuuguugacc

SEQ ID NO: 2454 - RNA, 16 nt, Artificial Sequence
  Synthetic Construct
uuccuuucuuguugac

SEQ ID NO: 2455 - RNA, 16 nt, Artificial Sequence
  Synthetic Construct
auuccuuucuuguuga

SEQ ID NO: 2456 - RNA, 16 nt, Artificial Sequence
  Synthetic Construct
cauuccuuucuuguug

SEQ ID NO: 2457 - RNA, 16 nt, Artificial Sequence
  Synthetic Construct
ccauuccuuucuuguu

SEQ ID NO: 2458 - RNA, 16 nt, Artificial Sequence
  Synthetic Construct
accauuccuuucuugu

SEQ ID NO: 2459 - RNA, 16 nt, Artificial Sequence
  Synthetic Construct
caccauuccuuucuug

SEQ ID NO: 2460 - RNA, 16 nt, Artificial Sequence
  Synthetic Construct
ucaccauuccuuucuu

SEQ ID NO: 2461 - RNA, 16 nt, Artificial Sequence
  Synthetic Construct
cucaccauuccuuucu

SEQ ID NO: 2462 - RNA, 16 nt, Artificial Sequence
  Synthetic Construct
acucaccauuccuuuc

SEQ ID NO: 2463 - RNA, 16 nt, Artificial Sequence
  Synthetic Construct
cacucaccauuccuuu

SEQ ID NO: 2464 - RNA, 16 nt, Artificial Sequence
  Synthetic Construct
ccacucaccauuccuu

SEQ ID NO: 2465 - RNA, 16 nt, Artificial Sequence
  Synthetic Construct
accacucaccauuccu

SEQ ID NO: 2466 - RNA, 16 nt, Artificial Sequence
  Synthetic Construct
caccacucaccauucc

SEQ ID NO: 2467 - RNA, 16 nt, Artificial Sequence
  Synthetic Construct
ccaccacucaccauuc

SEQ ID NO: 2468 - RNA, 16 nt, Artificial Sequence
  Synthetic Construct
accaccacucaccauu

SEQ ID NO: 2469 - RNA, 16 nt, Artificial Sequence
  Synthetic Construct
caccaccacucaccau

SEQ ID NO: 2470 - RNA, 16 nt, Artificial Sequence
  Synthetic Construct
ccaccaccacucacca

SEQ ID NO: 2471 - RNA, 16 nt, Artificial Sequence
  Synthetic Construct
gccaccaccacucacc

SEQ ID NO: 2472 - RNA, 16 nt, Artificial Sequence
  Synthetic Construct
agccaccaccacucac

SEQ ID NO: 2473 - RNA, 16 nt, Artificial Sequence
  Synthetic Construct
cagccaccaccacuca

SEQ ID NO: 2474 - RNA, 16 nt, Artificial Sequence
  Synthetic Construct
acagccaccaccacuc

SEQ ID NO: 2475 - RNA, 16 nt, Artificial Sequence
  Synthetic Construct
cacagccaccaccacu

SEQ ID NO: 2476 - RNA, 16 nt, Artificial Sequence
  Synthetic Construct
gcacagccaccaccac

SEQ ID NO: 2477 - RNA, 16 nt, Artificial Sequence
  Synthetic Construct
agcacagccaccacca

SEQ ID NO: 2478 - RNA, 16 nt, Artificial Sequence
  Synthetic Construct
gagcacagccaccacc

SEQ ID NO: 2479 - RNA, 16 nt, Artificial Sequence
  Synthetic Construct
agagcacagccaccac

SEQ ID NO: 2480 - RNA, 16 nt, Artificial Sequence
  Synthetic Construct
gagagcacagccacca

SEQ ID NO: 2481 - RNA, 16 nt, Artificial Sequence
  Synthetic Construct
ugagagcacagccacc

SEQ ID NO: 2482 - RNA, 16 nt, Artificial Sequence
  Synthetic Construct
uugagagcacagccac

SEQ ID NO: 2483 - RNA, 16 nt, Artificial Sequence
  Synthetic Construct
auugagagcacagcca

SEQ ID NO: 2484 - RNA, 16 nt, Artificial Sequence
  Synthetic Construct
aauugagagcacagcc

SEQ ID NO: 2485 - RNA, 16 nt, Artificial Sequence
  Synthetic Construct
aaauugagagcacagc

SEQ ID NO: 2486 - RNA, 16 nt, Artificial Sequence
  Synthetic Construct
aaaauugagagcacag

SEQ ID NO: 2487 - RNA, 16 nt, Artificial Sequence
  Synthetic Construct
gaaaauugagagcaca

SEQ ID NO: 2488 - RNA, 16 nt, Artificial Sequence
  Synthetic Construct
ggaaaauugagagcac

SEQ ID NO: 2489 - RNA, 16 nt, Artificial Sequence
  Synthetic Construct
gggaaaauugagagca

SEQ ID NO: 2490 - RNA, 16 nt, Artificial Sequence
  Synthetic Construct
agggaaaauugagagc

SEQ ID NO: 2491 - RNA, 16 nt, Artificial Sequence
  Synthetic Construct
cagggaaaauugagag

SEQ ID NO: 2492 - RNA, 16 nt, Artificial Sequence
  Synthetic Construct
acagggaaaauugaga

SEQ ID NO: 2493 - RNA, 16 nt, Artificial Sequence
  Synthetic Construct
gacagggaaaauugag

SEQ ID NO: 2494 - RNA, 16 nt, Artificial Sequence
  Synthetic Construct
agacagggaaaauuga

SEQ ID NO: 2495 - RNA, 16 nt, Artificial Sequence
  Synthetic Construct
gagacagggaaaauug

SEQ ID NO: 2496 - RNA, 16 nt, Artificial Sequence
  Synthetic Construct
ggagacagggaaaauu

SEQ ID NO: 2497 - RNA, 16 nt, Artificial Sequence
  Synthetic Construct
cggagacagggaaaau

SEQ ID NO: 2498 - RNA, 16 nt, Artificial Sequence
  Synthetic Construct
acggagacagggaaaa

SEQ ID NO: 2499 - RNA, 16 nt, Artificial Sequence
  Synthetic Construct
uacggagacagggaaa

SEQ ID NO: 2500 - RNA, 16 nt, Artificial Sequence
  Synthetic Construct
guacggagacagggaa

SEQ ID NO: 2501 - RNA, 16 nt, Artificial Sequence
  Synthetic Construct
uguacggagacaggga

SEQ ID NO: 2502 - RNA, 16 nt, Artificial Sequence
  Synthetic Construct
cuguacggagacaggg

SEQ ID NO: 2503 - RNA, 16 nt, Artificial Sequence
  Synthetic Construct
ccuguacggagacagg

SEQ ID NO: 2504 - RNA, 16 nt, Artificial Sequence
  Synthetic Construct
gccuguacggagacag

SEQ ID NO: 2505 - RNA, 16 nt, Artificial Sequence
  Synthetic Construct
agccuguacggagaca

SEQ ID NO: 2506 - RNA, 16 nt, Artificial Sequence
  Synthetic Construct
gagccuguacggagac

SEQ ID NO: 2507 - RNA, 16 nt, Artificial Sequence
  Synthetic Construct
agagccuguacggaga

SEQ ID NO: 2508 - RNA, 16 nt, Artificial Sequence
  Synthetic Construct
cagagccuguacggag

SEQ ID NO: 2509 - RNA, 16 nt, Artificial Sequence
  Synthetic Construct
acagagccuguacgga

SEQ ID NO: 2510 - RNA, 16 nt, Artificial Sequence
  Synthetic Construct
cacagagccuguacgg

SEQ ID NO: 2511 - RNA, 16 nt, Artificial Sequence
  Synthetic Construct
ccacagagccuguacg

SEQ ID NO: 2512 - RNA, 16 nt, Artificial Sequence
  Synthetic Construct
cccacagagccuguac

SEQ ID NO: 2513 - RNA, 16 nt, Artificial Sequence
  Synthetic Construct
ucccacagagccugua

SEQ ID NO: 2514 - RNA, 16 nt, Artificial Sequence
  Synthetic Construct
cucccacagagccugu

SEQ ID NO: 2515 - RNA, 16 nt, Artificial Sequence
  Synthetic Construct
ccucccacagagccug

SEQ ID NO: 2516 - RNA, 16 nt, Artificial Sequence
  Synthetic Construct
uccucccacagagccu

SEQ ID NO: 2517 - RNA, 16 nt, Artificial Sequence
  Synthetic Construct
auccucccacagagcc

SEQ ID NO: 2518 - RNA, 16 nt, Artificial Sequence
  Synthetic Construct
gauccucccacagagc

SEQ ID NO: 2519 - RNA, 16 nt, Artificial Sequence
  Synthetic Construct
ugauccucccacagag

SEQ ID NO: 2520 - RNA, 16 nt, Artificial Sequence
  Synthetic Construct
cugauccucccacaga

SEQ ID NO: 2521 - RNA, 16 nt, Artificial Sequence
  Synthetic Construct
ccugauccucccacag

SEQ ID NO: 2522 - RNA, 16 nt, Artificial Sequence
  Synthetic Construct
cccugauccucccaca

SEQ ID NO: 2523 - RNA, 16 nt, Artificial Sequence
  Synthetic Construct
gcccugauccucccac

SEQ ID NO: 2524 - RNA, 16 nt, Artificial Sequence
  Synthetic Construct
agcccugauccuccca

SEQ ID NO: 2525 - RNA, 16 nt, Artificial Sequence
  Synthetic Construct
cagcccugauccuccc

SEQ ID NO: 2526 - RNA, 16 nt, Artificial Sequence
  Synthetic Construct
ccagcccugauccucc

SEQ ID NO: 2527 - RNA, 16 nt, Artificial Sequence
  Synthetic Construct
cccagcccugauccuc

SEQ ID NO: 2528 - RNA, 16 nt, Artificial Sequence
  Synthetic Construct
ucccagcccugauccu

SEQ ID NO: 2529 - RNA, 16 nt, Artificial Sequence
  Synthetic Construct
uucccagcccugaucc

SEQ ID NO: 2530 - RNA, 16 nt, Artificial Sequence
  Synthetic Construct
guucccagcccugauc

SEQ ID NO: 2531 - RNA, 16 nt, Artificial Sequence
  Synthetic Construct
aguucccagcccugau

SEQ ID NO: 2532 - RNA, 16 nt, Artificial Sequence
  Synthetic Construct
gaguucccagcccuga

SEQ ID NO: 2533 - RNA, 16 nt, Artificial Sequence
  Synthetic Construct
agaguucccagcccug

SEQ ID NO: 2534 - RNA, 16 nt, Artificial Sequence
  Synthetic Construct
uagaguucccagcccu

SEQ ID NO: 2535 - RNA, 16 nt, Artificial Sequence
  Synthetic Construct
cuagaguucccagccc

SEQ ID NO: 2536 - RNA, 16 nt, Artificial Sequence
  Synthetic Construct
gcuagaguucccagcc

SEQ ID NO: 2537 - RNA, 16 nt, Artificial Sequence
  Synthetic Construct
ggcuagaguucccagc

SEQ ID NO: 2538 - RNA, 16 nt, Artificial Sequence
  Synthetic Construct
gggcuagaguucccag

SEQ ID NO: 2539 - RNA, 16 nt, Artificial Sequence
  Synthetic Construct
agggcuagaguuccca

SEQ ID NO: 2540 - RNA, 16 nt, Artificial Sequence
  Synthetic Construct
cagggcuagaguuccc

SEQ ID NO: 2541 - RNA, 16 nt, Artificial Sequence
  Synthetic Construct
ccagggcuagaguucc

SEQ ID NO: 2542 - RNA, 16 nt, Artificial Sequence
  Synthetic Construct
gccagggcuagaguuc

SEQ ID NO: 2543 - RNA, 16 nt, Artificial Sequence
  Synthetic Construct
ggccagggcuagaguu

SEQ ID NO: 2544 - RNA, 16 nt, Artificial Sequence
  Synthetic Construct
gggccagggcuagagu

SEQ ID NO: 2545 - RNA, 16 nt, Artificial Sequence
  Synthetic Construct
agggccagggcuagag

SEQ ID NO: 2546 - RNA, 16 nt, Artificial Sequence
  Synthetic Construct
cagggccagggcuaga

SEQ ID NO: 2547 - RNA, 16 nt, Artificial Sequence
  Synthetic Construct
ccagggccagggcuag

SEQ ID NO: 2548 - RNA, 16 nt, Artificial Sequence
  Synthetic Construct
cccagggccagggcua

SEQ ID NO: 2549 - RNA, 16 nt, Artificial Sequence
  Synthetic Construct
ccccagggccagggcu

SEQ ID NO: 2550 - RNA, 16 nt, Artificial Sequence
  Synthetic Construct
uccccagggccagggc

SEQ ID NO: 2551 - RNA, 16 nt, Artificial Sequence
  Synthetic Construct
auccccagggccaggg

SEQ ID NO: 2552 - RNA, 16 nt, Artificial Sequence
  Synthetic Construct
gauccccagggccagg

SEQ ID NO: 2553 - RNA, 16 nt, Artificial Sequence
  Synthetic Construct
ggauccccagggccag

SEQ ID NO: 2554 - RNA, 16 nt, Artificial Sequence
  Synthetic Construct
aggauccccagggcca

SEQ ID NO: 2555 - RNA, 16 nt, Artificial Sequence
  Synthetic Construct
caggauccccagggcc

SEQ ID NO: 2556 - RNA, 16 nt, Artificial Sequence
  Synthetic Construct
ccaggauccccagggc

SEQ ID NO: 2557 - RNA, 16 nt, Artificial Sequence
  Synthetic Construct
cccaggauccccaggg

SEQ ID NO: 2558 - RNA, 16 nt, Artificial Sequence
  Synthetic Construct
ucccaggauccccagg

SEQ ID NO: 2559 - RNA, 16 nt, Artificial Sequence
  Synthetic Construct
cucccaggauccccag

SEQ ID NO: 2560 - RNA, 16 nt, Artificial Sequence
  Synthetic Construct
ccucccaggaucccca

SEQ ID NO: 2561 - RNA, 16 nt, Artificial Sequence
  Synthetic Construct
gccucccaggaucccc

SEQ ID NO: 2562 - RNA, 16 nt, Artificial Sequence
  Synthetic Construct
ggccucccaggauccc

SEQ ID NO: 2563 - RNA, 16 nt, Artificial Sequence
  Synthetic Construct
aggccucccaggaucc

SEQ ID NO: 2564 - RNA, 16 nt, Artificial Sequence
  Synthetic Construct
caggccucccaggauc

SEQ ID NO: 2565 - RNA, 16 nt, Artificial Sequence
  Synthetic Construct
ccaggccucccaggau

SEQ ID NO: 2566 - RNA, 16 nt, Artificial Sequence
  Synthetic Construct
cccaggccucccagga

SEQ ID NO: 2567 - RNA, 16 nt, Artificial Sequence
  Synthetic Construct
ccccaggccucccagg

SEQ ID NO: 2568 - RNA, 16 nt, Artificial Sequence
  Synthetic Construct
uccccaggccucccag

SEQ ID NO: 2569 - RNA, 16 nt, Artificial Sequence
  Synthetic Construct
guccccaggccuccca

SEQ ID NO: 2570 - RNA, 16 nt, Artificial Sequence
  Synthetic Construct
uguccccaggccuccc

SEQ ID NO: 2571 - RNA, 16 nt, Artificial Sequence
  Synthetic Construct
cuguccccaggccucc

SEQ ID NO: 2572 - RNA, 16 nt, Artificial Sequence
  Synthetic Construct
gcuguccccaggccuc

SEQ ID NO: 2573 - RNA, 16 nt, Artificial Sequence
  Synthetic Construct
ggcuguccccaggccu

SEQ ID NO: 2574 - RNA, 16 nt, Artificial Sequence
  Synthetic Construct
cggcuguccccaggcc

SEQ ID NO: 2575 - RNA, 16 nt, Artificial Sequence
  Synthetic Construct
gcggcuguccccaggc

SEQ ID NO: 2576 - RNA, 16 nt, Artificial Sequence
  Synthetic Construct
ggcggcuguccccagg

SEQ ID NO: 2577 - RNA, 16 nt, Artificial Sequence
  Synthetic Construct
gggcggcuguccccag

SEQ ID NO: 2578 - RNA, 16 nt, Artificial Sequence
  Synthetic Construct
agggcggcugucccca

SEQ ID NO: 2579 - RNA, 16 nt, Artificial Sequence
  Synthetic Construct
cagggcggcugucccc

SEQ ID NO: 2580 - RNA, 16 nt, Artificial Sequence
  Synthetic Construct
gcagggcggcuguccc

SEQ ID NO: 2581 - RNA, 16 nt, Artificial Sequence
  Synthetic Construct
agcagggcggcugucc

SEQ ID NO: 2582 - RNA, 16 nt, Artificial Sequence
  Synthetic Construct
gagcagggcggcuguc

SEQ ID NO: 2583 - RNA, 16 nt, Artificial Sequence
  Synthetic Construct
ugagcagggcggcugu

SEQ ID NO: 2584 - RNA, 16 nt, Artificial Sequence
  Synthetic Construct
augagcagggcggcug

SEQ ID NO: 2585 - RNA, 16 nt, Artificial Sequence
  Synthetic Construct
aaugagcagggcggcu

SEQ ID NO: 2586 - RNA, 16 nt, Artificial Sequence
  Synthetic Construct
caaugagcagggcggc

SEQ ID NO: 2587 - RNA, 16 nt, Artificial Sequence
  Synthetic Construct
ccaaugagcagggcgg

SEQ ID NO: 2588 - RNA, 16 nt, Artificial Sequence
  Synthetic Construct
cccaaugagcagggcg

SEQ ID NO: 2589 - RNA, 16 nt, Artificial Sequence
  Synthetic Construct
ccccaaugagcagggc

SEQ ID NO: 2590 - RNA, 16 nt, Artificial Sequence
  Synthetic Construct
accccaaugagcaggg

SEQ ID NO: 2591 - RNA, 16 nt, Artificial Sequence
  Synthetic Construct
gaccccaaugagcagg

SEQ ID NO: 2592 - RNA, 16 nt, Artificial Sequence
  Synthetic Construct
ugaccccaaugagcag

SEQ ID NO: 2593 - RNA, 16 nt, Artificial Sequence
  Synthetic Construct
augaccccaaugagca

SEQ ID NO: 2594 - RNA, 16 nt, Artificial Sequence
  Synthetic Construct
gaugaccccaaugagc

SEQ ID NO: 2595 - RNA, 16 nt, Artificial Sequence
  Synthetic Construct
agaugaccccaaugag

SEQ ID NO: 2596 - RNA, 16 nt, Artificial Sequence
  Synthetic Construct
aagaugaccccaauga

SEQ ID NO: 2597 - RNA, 16 nt, Artificial Sequence
  Synthetic Construct
caagaugaccccaaug

SEQ ID NO: 2598 - RNA, 16 nt, Artificial Sequence
  Synthetic Construct
acaagaugaccccaau

SEQ ID NO: 2599 - RNA, 16 nt, Artificial Sequence
  Synthetic Construct
cacaagaugaccccaa

SEQ ID NO: 2600 - RNA, 16 nt, Artificial Sequence
  Synthetic Construct
ccacaagaugacccca

SEQ ID NO: 2601 - RNA, 16 nt, Artificial Sequence
  Synthetic Construct
gccacaagaugacccc

SEQ ID NO: 2602 - RNA, 16 nt, Artificial Sequence
  Synthetic Construct
ugccacaagaugaccc

SEQ ID NO: 2603 - RNA, 16 nt, Artificial Sequence
  Synthetic Construct
uugccacaagaugacc

SEQ ID NO: 2604 - RNA, 16 nt, Artificial Sequence
  Synthetic Construct
uuugccacaagaugac

SEQ ID NO: 2605 - RNA, 16 nt, Artificial Sequence
  Synthetic Construct
cuuugccacaagauga

SEQ ID NO: 2606 - RNA, 16 nt, Artificial Sequence
  Synthetic Construct
ccuuugccacaagaug

SEQ ID NO: 2607 - RNA, 16 nt, Artificial Sequence
  Synthetic Construct
gccuuugccacaagau

SEQ ID NO: 2608 - RNA, 16 nt, Artificial Sequence
  Synthetic Construct
cgccuuugccacaaga

SEQ ID NO: 2609 - RNA, 16 nt, Artificial Sequence
  Synthetic Construct
ccgccuuugccacaag

SEQ ID NO: 2610 - RNA, 16 nt, Artificial Sequence
  Synthetic Construct
gccgccuuugccacaa

SEQ ID NO: 2611 - RNA, 16 nt, Artificial Sequence
  Synthetic Construct
ugccgccuuugccaca

SEQ ID NO: 2612 - RNA, 16 nt, Artificial Sequence
  Synthetic Construct
uugccgccuuugccac

SEQ ID NO: 2613 - RNA, 16 nt, Artificial Sequence
  Synthetic Construct
guugccgccuuugcca

SEQ ID NO: 2614 - RNA, 16 nt, Artificial Sequence
  Synthetic Construct
cguugccgccuuugcc

SEQ ID NO: 2615 - RNA, 16 nt, Artificial Sequence
  Synthetic Construct
gcguugccgccuuugc

SEQ ID NO: 2616 - RNA, 16 nt, Artificial Sequence
  Synthetic Construct
ggcguugccgccuuug

SEQ ID NO: 2617 - RNA, 16 nt, Artificial Sequence
  Synthetic Construct
cggcguugccgccuuu

SEQ ID NO: 2618 - RNA, 16 nt, Artificial Sequence
  Synthetic Construct
ucggcguugccgccuu

SEQ ID NO: 2619 - RNA, 16 nt, Artificial Sequence
  Synthetic Construct
cucggcguugccgccu

SEQ ID NO: 2620 - RNA, 16 nt, Artificial Sequence
  Synthetic Construct
ccucggcguugccgcc

SEQ ID NO: 2621 - RNA, 16 nt, Artificial Sequence
  Synthetic Construct
uccucggcguugccgc

SEQ ID NO: 2622 - RNA, 16 nt, Artificial Sequence
  Synthetic Construct
cuccucggcguugccg

SEQ ID NO: 2623 - RNA, 16 nt, Artificial Sequence
  Synthetic Construct
ucuccucggcguugcc

SEQ ID NO: 2624 - RNA, 16 nt, Artificial Sequence
  Synthetic Construct
cucuccucggcguugc

SEQ ID NO: 2625 - RNA, 16 nt, Artificial Sequence
  Synthetic Construct
ccucuccucggcguug

SEQ ID NO: 2626 - RNA, 16 nt, Artificial Sequence
  Synthetic Construct
uccucuccucggcguu

SEQ ID NO: 2627 - RNA, 16 nt, Artificial Sequence
  Synthetic Construct
cuccucuccucggcgu

SEQ ID NO: 2628 - RNA, 16 nt, Artificial Sequence
  Synthetic Construct
ucuccucuccucggcg

SEQ ID NO: 2629 - RNA, 16 nt, Artificial Sequence
  Synthetic Construct
cucuccucuccucggc

SEQ ID NO: 2630 - RNA, 15 nt, Artificial Sequence
  Synthetic Construct
ccuccucgccugguu

SEQ ID NO: 2631 - RNA, 15 nt, Artificial Sequence
  Synthetic Construct
cccuccucgccuggu

SEQ ID NO: 2632 - RNA, 15 nt, Artificial Sequence
  Synthetic Construct
ccccuccucgccugg

SEQ ID NO: 2633 - RNA, 15 nt, Artificial Sequence
  Synthetic Construct
gccccuccucgccug

SEQ ID NO: 2634 - RNA, 15 nt, Artificial Sequence
  Synthetic Construct
ggccccuccucgccu

SEQ ID NO: 2635 - RNA, 15 nt, Artificial Sequence
  Synthetic Construct
uggccccuccucgcc

SEQ ID NO: 2636 - RNA, 15 nt, Artificial Sequence
  Synthetic Construct
uuggccccuccucgc

SEQ ID NO: 2637 - RNA, 15 nt, Artificial Sequence
  Synthetic Construct
guuggccccuccucg

SEQ ID NO: 2638 - RNA, 15 nt, Artificial Sequence
  Synthetic Construct
aguuggccccuccuc

SEQ ID NO: 2639 - RNA, 15 nt, Artificial Sequence
  Synthetic Construct
caguuggccccuccu

SEQ ID NO: 2640 - RNA, 15 nt, Artificial Sequence
  Synthetic Construct
gcaguuggccccucc

SEQ ID NO: 2641 - RNA, 15 nt, Artificial Sequence
  Synthetic Construct
ugcaguuggccccuc

SEQ ID NO: 2642 - RNA, 15 nt, Artificial Sequence
  Synthetic Construct
cugcaguuggccccu

SEQ ID NO: 2643 - RNA, 15 nt, Artificial Sequence
  Synthetic Construct
ccugcaguuggcccc

SEQ ID NO: 2644 - RNA, 15 nt, Artificial Sequence
  Synthetic Construct
accugcaguuggccc

SEQ ID NO: 2645 - RNA, 15 nt, Artificial Sequence
  Synthetic Construct
caccugcaguuggcc

SEQ ID NO: 2646 - RNA, 15 nt, Artificial Sequence
  Synthetic Construct
ucaccugcaguuggc

SEQ ID NO: 2647 - RNA, 15 nt, Artificial Sequence
  Synthetic Construct
cucaccugcaguugg

SEQ ID NO: 2648 - RNA, 15 nt, Artificial Sequence
  Synthetic Construct
ccucaccugcaguug

SEQ ID NO: 2649 - RNA, 15 nt, Artificial Sequence
  Synthetic Construct
cccucaccugcaguu

SEQ ID NO: 2650 - RNA, 15 nt, Artificial Sequence
  Synthetic Construct
ccccucaccugcagu

SEQ ID NO: 2651 - RNA, 15 nt, Artificial Sequence
  Synthetic Construct
accccucaccugcag

SEQ ID NO: 2652 - RNA, 15 nt, Artificial Sequence
  Synthetic Construct
aaccccucaccugca

SEQ ID NO: 2653 - RNA, 15 nt, Artificial Sequence
  Synthetic Construct
aaaccccucaccugc

SEQ ID NO: 2654 - RNA, 15 nt, Artificial Sequence
  Synthetic Construct
caaaccccucaccug

SEQ ID NO: 2655 - RNA, 15 nt, Artificial Sequence
  Synthetic Construct
ucaaaccccucaccu

SEQ ID NO: 2656 - RNA, 15 nt, Artificial Sequence
  Synthetic Construct
aucaaaccccucacc

SEQ ID NO: 2657 - RNA, 15 nt, Artificial Sequence
  Synthetic Construct
uaucaaaccccucac

SEQ ID NO: 2658 - RNA, 15 nt, Artificial Sequence
  Synthetic Construct
uuaucaaaccccuca

SEQ ID NO: 2659 - RNA, 15 nt, Artificial Sequence
  Synthetic Construct
uuuaucaaaccccuc

SEQ ID NO: 2660 - RNA, 15 nt, Artificial Sequence
  Synthetic Construct
cuuuaucaaaccccu

SEQ ID NO: 2661 - RNA, 15 nt, Artificial Sequence
  Synthetic Construct
acuuuaucaaacccc

SEQ ID NO: 2662 - RNA, 15 nt, Artificial Sequence
  Synthetic Construct
gacuuuaucaaaccc

SEQ ID NO: 2663 - RNA, 15 nt, Artificial Sequence
  Synthetic Construct
ugacuuuaucaaacc

SEQ ID NO: 2664 - RNA, 15 nt, Artificial Sequence
  Synthetic Construct
cugacuuuaucaaac

SEQ ID NO: 2665 - RNA, 15 nt, Artificial Sequence
  Synthetic Construct
ccugacuuuaucaaa

SEQ ID NO: 2666 - RNA, 15 nt, Artificial Sequence
  Synthetic Construct
cccugacuuuaucaa

SEQ ID NO: 2667 - RNA, 15 nt, Artificial Sequence
  Synthetic Construct
ucccugacuuuauca

SEQ ID NO: 2668 - RNA, 15 nt, Artificial Sequence
  Synthetic Construct
uucccugacuuuauc

SEQ ID NO: 2669 - RNA, 15 nt, Artificial Sequence
  Synthetic Construct
cuucccugacuuuau

SEQ ID NO: 2670 - RNA, 15 nt, Artificial Sequence
  Synthetic Construct
gcuucccugacuuua

SEQ ID NO: 2671 - RNA, 15 nt, Artificial Sequence
  Synthetic Construct
ugcuucccugacuuu

SEQ ID NO: 2672 - RNA, 15 nt, Artificial Sequence
  Synthetic Construct
cugcuucccugacuu

SEQ ID NO: 2673 - RNA, 15 nt, Artificial Sequence
  Synthetic Construct
ucugcuucccugacu

SEQ ID NO: 2674 - RNA, 15 nt, Artificial Sequence
  Synthetic Construct
uucugcuucccugac

SEQ ID NO: 2675 - RNA, 15 nt, Artificial Sequence
  Synthetic Construct
cuucugcuucccuga

SEQ ID NO: 2676 - RNA, 15 nt, Artificial Sequence
  Synthetic Construct
ucuucugcuucccug

SEQ ID NO: 2677 - RNA, 15 nt, Artificial Sequence
  Synthetic Construct
aucuucugcuucccu

SEQ ID NO: 2678 - RNA, 15 nt, Artificial Sequence
  Synthetic Construct
uaucuucugcuuccc

SEQ ID NO: 2679 - RNA, 15 nt, Artificial Sequence
  Synthetic Construct
cuaucuucugcuucc

SEQ ID NO: 2680 - RNA, 15 nt, Artificial Sequence
  Synthetic Construct
gcuaucuucugcuuc

SEQ ID NO: 2681 - RNA, 15 nt, Artificial Sequence
  Synthetic Construct
ggcuaucuucugcuu

SEQ ID NO: 2682 - RNA, 15 nt, Artificial Sequence
  Synthetic Construct
gggcuaucuucugcu

SEQ ID NO: 2683 - RNA, 15 nt, Artificial Sequence
  Synthetic Construct
ggggcuaucuucugc

SEQ ID NO: 2684 - RNA, 15 nt, Artificial Sequence
  Synthetic Construct
gggggcuaucuucug

SEQ ID NO: 2685 - RNA, 15 nt, Artificial Sequence
  Synthetic Construct
ugggggcuaucuucu

SEQ ID NO: 2686 - RNA, 15 nt, Artificial Sequence
  Synthetic Construct
uugggggcuaucuuc

SEQ ID NO: 2687 - RNA, 15 nt, Artificial Sequence
  Synthetic Construct
guugggggcuaucuu

SEQ ID NO: 2688 - RNA, 15 nt, Artificial Sequence
  Synthetic Construct
uguugggggcuaucu

SEQ ID NO: 2689 - RNA, 15 nt, Artificial Sequence
  Synthetic Construct
guguugggggcuauc

SEQ ID NO: 2690 - RNA, 15 nt, Artificial Sequence
  Synthetic Construct
uguguugggggcuau

SEQ ID NO: 2691 - RNA, 15 nt, Artificial Sequence
  Synthetic Construct
auguguugggggcua

SEQ ID NO: 2692 - RNA, 15 nt, Artificial Sequence
  Synthetic Construct
cauguguugggggcu

SEQ ID NO: 2693 - RNA, 15 nt, Artificial Sequence
  Synthetic Construct
acauguguugggggc

SEQ ID NO: 2694 - RNA, 15 nt, Artificial Sequence
  Synthetic Construct
cacauguguuggggg

SEQ ID NO: 2695 - RNA, 15 nt, Artificial Sequence
  Synthetic Construct
ucacauguguugggg

SEQ ID NO: 2696 - RNA, 15 nt, Artificial Sequence
  Synthetic Construct
gucacauguguuggg

SEQ ID NO: 2697 - RNA, 15 nt, Artificial Sequence
  Synthetic Construct
agucacauguguugg

SEQ ID NO: 2698 - RNA, 15 nt, Artificial Sequence
  Synthetic Construct
cagucacauguguug

SEQ ID NO: 2699 - RNA, 15 nt, Artificial Sequence
  Synthetic Construct
ccagucacauguguu

SEQ ID NO: 2700 - RNA, 15 nt, Artificial Sequence
  Synthetic Construct
cccagucacaugugu

SEQ ID NO: 2701 - RNA, 15 nt, Artificial Sequence
  Synthetic Construct
ccccagucacaugug

SEQ ID NO: 2702 - RNA, 15 nt, Artificial Sequence
  Synthetic Construct
cccccagucacaugu

SEQ ID NO: 2703 - RNA, 15 nt, Artificial Sequence
  Synthetic Construct
ccccccagucacaug

SEQ ID NO: 2704 - RNA, 15 nt, Artificial Sequence
  Synthetic Construct
uccccccagucacau

SEQ ID NO: 2705 - RNA, 15 nt, Artificial Sequence
  Synthetic Construct
auccccccagucaca

SEQ ID NO: 2706 - RNA, 15 nt, Artificial Sequence
  Synthetic Construct
cauccccccagucac

SEQ ID NO: 2707 - RNA, 15 nt, Artificial Sequence
  Synthetic Construct
ccauccccccaguca

SEQ ID NO: 2708 - RNA, 15 nt, Artificial Sequence
  Synthetic Construct
accauccccccaguc

SEQ ID NO: 2709 - RNA, 15 nt, Artificial Sequence
  Synthetic Construct
gaccauccccccagu

SEQ ID NO: 2710 - RNA, 15 nt, Artificial Sequence
  Synthetic Construct
ugaccauccccccag

SEQ ID NO: 2711 - RNA, 15 nt, Artificial Sequence
  Synthetic Construct
uugaccaucccccca

SEQ ID NO: 2712 - RNA, 15 nt, Artificial Sequence
  Synthetic Construct
guugaccaucccccc

SEQ ID NO: 2713 - RNA, 15 nt, Artificial Sequence
  Synthetic Construct
uguugaccauccccc

SEQ ID NO: 2714 - RNA, 15 nt, Artificial Sequence
  Synthetic Construct
uuguugaccaucccc

SEQ ID NO: 2715 - RNA, 15 nt, Artificial Sequence
  Synthetic Construct
cuuguugaccauccc

SEQ ID NO: 2716 - RNA, 15 nt, Artificial Sequence
  Synthetic Construct
ucuuguugaccaucc

SEQ ID NO: 2717 - RNA, 15 nt, Artificial Sequence
  Synthetic Construct
uucuuguugaccauc

SEQ ID NO: 2718 - RNA, 15 nt, Artificial Sequence
  Synthetic Construct
uuucuuguugaccau

SEQ ID NO: 2719 - RNA, 15 nt, Artificial Sequence
  Synthetic Construct
cuuucuuguugacca

SEQ ID NO: 2720 - RNA, 15 nt, Artificial Sequence
  Synthetic Construct
ccuuucuuguugacc

SEQ ID NO: 2721 - RNA, 15 nt, Artificial Sequence
  Synthetic Construct
uccuuucuuguugac

SEQ ID NO: 2722 - RNA, 15 nt, Artificial Sequence
  Synthetic Construct
uuccuuucuuguuga

SEQ ID NO: 2723 - RNA, 15 nt, Artificial Sequence
  Synthetic Construct
auuccuuucuuguug

SEQ ID NO: 2724 - RNA, 15 nt, Artificial Sequence
  Synthetic Construct
cauuccuuucuuguu

SEQ ID NO: 2725 - RNA, 15 nt, Artificial Sequence
  Synthetic Construct
ccauuccuuucuugu

SEQ ID NO: 2726 - RNA, 15 nt, Artificial Sequence
  Synthetic Construct
accauuccuuucuug

SEQ ID NO: 2727 - RNA, 15 nt, Artificial Sequence
  Synthetic Construct
caccauuccuuucuu

SEQ ID NO: 2728 - RNA, 15 nt, Artificial Sequence
  Synthetic Construct
ucaccauuccuuucu

SEQ ID NO: 2729 - RNA, 15 nt, Artificial Sequence
  Synthetic Construct
cucaccauuccuuuc

SEQ ID NO: 2730 - RNA, 15 nt, Artificial Sequence
  Synthetic Construct
acucaccauuccuuu

SEQ ID NO: 2731 - RNA, 15 nt, Artificial Sequence
  Synthetic Construct
cacucaccauuccuu

SEQ ID NO: 2732 - RNA, 15 nt, Artificial Sequence
  Synthetic Construct
ccacucaccauuccu

SEQ ID NO: 2733 - RNA, 15 nt, Artificial Sequence
  Synthetic Construct
accacucaccauucc

SEQ ID NO: 2734 - RNA, 15 nt, Artificial Sequence
  Synthetic Construct
caccacucaccauuc

SEQ ID NO: 2735 - RNA, 15 nt, Artificial Sequence
  Synthetic Construct
ccaccacucaccauu

SEQ ID NO: 2736 - RNA, 15 nt, Artificial Sequence
  Synthetic Construct
accaccacucaccau

SEQ ID NO: 2737 - RNA, 15 nt, Artificial Sequence
  Synthetic Construct
caccaccacucacca

SEQ ID NO: 2738 - RNA, 15 nt, Artificial Sequence
  Synthetic Construct
ccaccaccacucacc

SEQ ID NO: 2739 - RNA, 15 nt, Artificial Sequence
  Synthetic Construct
gccaccaccacucac

SEQ ID NO: 2740 - RNA, 15 nt, Artificial Sequence
  Synthetic Construct
agccaccaccacuca

SEQ ID NO: 2741 - RNA, 15 nt, Artificial Sequence
  Synthetic Construct
cagccaccaccacuc

SEQ ID NO: 2742 - RNA, 15 nt, Artificial Sequence
  Synthetic Construct
acagccaccaccacu

SEQ ID NO: 2743 - RNA, 15 nt, Artificial Sequence
  Synthetic Construct
cacagccaccaccac

SEQ ID NO: 2744 - RNA, 15 nt, Artificial Sequence
  Synthetic Construct
gcacagccaccacca

SEQ ID NO: 2745 - RNA, 15 nt, Artificial Sequence
  Synthetic Construct
agcacagccaccacc

SEQ ID NO: 2746 - RNA, 15 nt, Artificial Sequence
  Synthetic Construct
gagcacagccaccac

SEQ ID NO: 2747 - RNA, 15 nt, Artificial Sequence
  Synthetic Construct
agagcacagccacca

SEQ ID NO: 2748 - RNA, 15 nt, Artificial Sequence
  Synthetic Construct
gagagcacagccacc

SEQ ID NO: 2749 - RNA, 15 nt, Artificial Sequence
  Synthetic Construct
ugagagcacagccac

SEQ ID NO: 2750 - RNA, 15 nt, Artificial Sequence
  Synthetic Construct
uugagagcacagcca

SEQ ID NO: 2751 - RNA, 15 nt, Artificial Sequence
  Synthetic Construct
auugagagcacagcc

SEQ ID NO: 2752 - RNA, 15 nt, Artificial Sequence
  Synthetic Construct
aauugagagcacagc

SEQ ID NO: 2753 - RNA, 15 nt, Artificial Sequence
  Synthetic Construct
aaauugagagcacag

SEQ ID NO: 2754 - RNA, 15 nt, Artificial Sequence
  Synthetic Construct
aaaauugagagcaca

SEQ ID NO: 2755 - RNA, 15 nt, Artificial Sequence
  Synthetic Construct
gaaaauugagagcac

SEQ ID NO: 2756 - RNA, 15 nt, Artificial Sequence
  Synthetic Construct
ggaaaauugagagca

SEQ ID NO: 2757 - RNA, 15 nt, Artificial Sequence
  Synthetic Construct
gggaaaauugagagc

SEQ ID NO: 2758 - RNA, 15 nt, Artificial Sequence
  Synthetic Construct
agggaaaauugagag

SEQ ID NO: 2759 - RNA, 15 nt, Artificial Sequence
  Synthetic Construct
cagggaaaauugaga

SEQ ID NO: 2760 - RNA, 15 nt, Artificial Sequence
  Synthetic Construct
acagggaaaauugag

SEQ ID NO: 2761 - RNA, 15 nt, Artificial Sequence
  Synthetic Construct
gacagggaaaauuga

SEQ ID NO: 2762 - RNA, 15 nt, Artificial Sequence
  Synthetic Construct
agacagggaaaauug

SEQ ID NO: 2763 - RNA, 15 nt, Artificial Sequence
  Synthetic Construct
gagacagggaaaauu

SEQ ID NO: 2764 - RNA, 15 nt, Artificial Sequence
  Synthetic Construct
ggagacagggaaaau

SEQ ID NO: 2765 - RNA, 15 nt, Artificial Sequence
  Synthetic Construct
cggagacagggaaaa

SEQ ID NO: 2766 - RNA, 15 nt, Artificial Sequence
  Synthetic Construct
acggagacagggaaa

SEQ ID NO: 2767 - RNA, 15 nt, Artificial Sequence
  Synthetic Construct
uacggagacagggaa

SEQ ID NO: 2768 - RNA, 15 nt, Artificial Sequence
  Synthetic Construct
guacggagacaggga

SEQ ID NO: 2769 - RNA, 15 nt, Artificial Sequence
  Synthetic Construct
uguacggagacaggg

SEQ ID NO: 2770 - RNA, 15 nt, Artificial Sequence
  Synthetic Construct
cuguacggagacagg

SEQ ID NO: 2771 - RNA, 15 nt, Artificial Sequence
  Synthetic Construct
ccuguacggagacag

SEQ ID NO: 2772 - RNA, 15 nt, Artificial Sequence
  Synthetic Construct
gccuguacggagaca

SEQ ID NO: 2773 - RNA, 15 nt, Artificial Sequence
  Synthetic Construct
agccuguacggagac

SEQ ID NO: 2774 - RNA, 15 nt, Artificial Sequence
  Synthetic Construct
gagccuguacggaga

SEQ ID NO: 2775 - RNA, 15 nt, Artificial Sequence
  Synthetic Construct
agagccuguacggag

SEQ ID NO: 2776 - RNA, 15 nt, Artificial Sequence
  Synthetic Construct
cagagccuguacgga

SEQ ID NO: 2777 - RNA, 15 nt, Artificial Sequence
  Synthetic Construct
acagagccuguacgg

SEQ ID NO: 2778 - RNA, 15 nt, Artificial Sequence
  Synthetic Construct
cacagagccuguacg

SEQ ID NO: 2779 - RNA, 15 nt, Artificial Sequence
  Synthetic Construct
ccacagagccuguac

SEQ ID NO: 2780 - RNA, 15 nt, Artificial Sequence
  Synthetic Construct
cccacagagccugua

SEQ ID NO: 2781 - RNA, 15 nt, Artificial Sequence
  Synthetic Construct
ucccacagagccugu

SEQ ID NO: 2782 - RNA, 15 nt, Artificial Sequence
  Synthetic Construct
cucccacagagccug

SEQ ID NO: 2783 - RNA, 15 nt, Artificial Sequence
  Synthetic Construct
ccucccacagagccu

SEQ ID NO: 2784 - RNA, 15 nt, Artificial Sequence
  Synthetic Construct
uccucccacagagcc

SEQ ID NO: 2785 - RNA, 15 nt, Artificial Sequence
  Synthetic Construct
auccucccacagagc

SEQ ID NO: 2786 - RNA, 15 nt, Artificial Sequence
  Synthetic Construct
gauccucccacagag

SEQ ID NO: 2787 - RNA, 15 nt, Artificial Sequence
  Synthetic Construct
ugauccucccacaga

SEQ ID NO: 2788 - RNA, 15 nt, Artificial Sequence
  Synthetic Construct
cugauccucccacag

SEQ ID NO: 2789 - RNA, 15 nt, Artificial Sequence
  Synthetic Construct
ccugauccucccaca

SEQ ID NO: 2790 - RNA, 15 nt, Artificial Sequence
  Synthetic Construct
cccugauccucccac

SEQ ID NO: 2791 - RNA, 15 nt, Artificial Sequence
  Synthetic Construct
gcccugauccuccca

SEQ ID NO: 2792 - RNA, 15 nt, Artificial Sequence
  Synthetic Construct
agcccugauccuccc

SEQ ID NO: 2793 - RNA, 15 nt, Artificial Sequence
  Synthetic Construct
cagcccugauccucc

SEQ ID NO: 2794 - RNA, 15 nt, Artificial Sequence
  Synthetic Construct
ccagcccugauccuc

SEQ ID NO: 2795 - RNA, 15 nt, Artificial Sequence
  Synthetic Construct
cccagcccugauccu

SEQ ID NO: 2796 - RNA, 15 nt, Artificial Sequence
  Synthetic Construct
ucccagcccugaucc

SEQ ID NO: 2797 - RNA, 15 nt, Artificial Sequence
  Synthetic Construct
uucccagcccugauc

SEQ ID NO: 2798 - RNA, 15 nt, Artificial Sequence
  Synthetic Construct
guucccagcccugau

SEQ ID NO: 2799 - RNA, 15 nt, Artificial Sequence
  Synthetic Construct
aguucccagcccuga

SEQ ID NO: 2800 - RNA, 15 nt, Artificial Sequence
  Synthetic Construct
gaguucccagcccug

SEQ ID NO: 2801 - RNA, 15 nt, Artificial Sequence
  Synthetic Construct
agaguucccagcccu

SEQ ID NO: 2802 - RNA, 15 nt, Artificial Sequence
  Synthetic Construct
uagaguucccagccc

SEQ ID NO: 2803 - RNA, 15 nt, Artificial Sequence
  Synthetic Construct
cuagaguucccagcc

SEQ ID NO: 2804 - RNA, 15 nt, Artificial Sequence
  Synthetic Construct
gcuagaguucccagc

SEQ ID NO: 2805 - RNA, 15 nt, Artificial Sequence
  Synthetic Construct
ggcuagaguucccag

SEQ ID NO: 2806 - RNA, 15 nt, Artificial Sequence
  Synthetic Construct
gggcuagaguuccca

SEQ ID NO: 2807 - RNA, 15 nt, Artificial Sequence
  Synthetic Construct
agggcuagaguuccc

SEQ ID NO: 2808 - RNA, 15 nt, Artificial Sequence
  Synthetic Construct
cagggcuagaguucc

SEQ ID NO: 2809 - RNA, 15 nt, Artificial Sequence
  Synthetic Construct
ccagggcuagaguuc

SEQ ID NO: 2810 - RNA, 15 nt, Artificial Sequence
  Synthetic Construct
gccagggcuagaguu

SEQ ID NO: 2811 - RNA, 15 nt, Artificial Sequence
  Synthetic Construct
ggccagggcuagagu

SEQ ID NO: 2812 - RNA, 15 nt, Artificial Sequence
  Synthetic Construct
gggccagggcuagag

SEQ ID NO: 2813 - RNA, 15 nt, Artificial Sequence
  Synthetic Construct
agggccagggcuaga

SEQ ID NO: 2814 - RNA, 15 nt, Artificial Sequence
  Synthetic Construct
cagggccagggcuag

SEQ ID NO: 2815 - RNA, 15 nt, Artificial Sequence
  Synthetic Construct
ccagggccagggcua

SEQ ID NO: 2816 - RNA, 15 nt, Artificial Sequence
  Synthetic Construct
cccagggccagggcu

SEQ ID NO: 2817 - RNA, 15 nt, Artificial Sequence
  Synthetic Construct
ccccagggccagggc

SEQ ID NO: 2818 - RNA, 15 nt, Artificial Sequence
  Synthetic Construct
uccccagggccaggg

SEQ ID NO: 2819 - RNA, 15 nt, Artificial Sequence
  Synthetic Construct
auccccagggccagg

SEQ ID NO: 2820 - RNA, 15 nt, Artificial Sequence
  Synthetic Construct
gauccccagggccag

SEQ ID NO: 2821 - RNA, 15 nt, Artificial Sequence
  Synthetic Construct
ggauccccagggcca

SEQ ID NO: 2822 - RNA, 15 nt, Artificial Sequence
  Synthetic Construct
aggauccccagggcc

SEQ ID NO: 2823 - RNA, 15 nt, Artificial Sequence
  Synthetic Construct
caggauccccagggc

SEQ ID NO: 2824 - RNA, 15 nt, Artificial Sequence
  Synthetic Construct
ccaggauccccaggg

SEQ ID NO: 2825 - RNA, 15 nt, Artificial Sequence
  Synthetic Construct
cccaggauccccagg

SEQ ID NO: 2826 - RNA, 15 nt, Artificial Sequence
  Synthetic Construct
ucccaggauccccag

SEQ ID NO: 2827 - RNA, 15 nt, Artificial Sequence
  Synthetic Construct
cucccaggaucccca

SEQ ID NO: 2828 - RNA, 15 nt, Artificial Sequence
  Synthetic Construct
ccucccaggaucccc

SEQ ID NO: 2829 - RNA, 15 nt, Artificial Sequence
  Synthetic Construct
gccucccaggauccc

SEQ ID NO: 2830 - RNA, 15 nt, Artificial Sequence
  Synthetic Construct
ggccucccaggaucc

SEQ ID NO: 2831 - RNA, 15 nt, Artificial Sequence
  Synthetic Construct
aggccucccaggauc

SEQ ID NO: 2832 - RNA, 15 nt, Artificial Sequence
  Synthetic Construct
caggccucccaggau

SEQ ID NO: 2833 - RNA, 15 nt, Artificial Sequence
  Synthetic Construct
ccaggccucccagga

SEQ ID NO: 2834 - RNA, 15 nt, Artificial Sequence
  Synthetic Construct
cccaggccucccagg

SEQ ID NO: 2835 - RNA, 15 nt, Artificial Sequence
  Synthetic Construct
ccccaggccucccag

SEQ ID NO: 2836 - RNA, 15 nt, Artificial Sequence
  Synthetic Construct
uccccaggccuccca

SEQ ID NO: 2837 - RNA, 15 nt, Artificial Sequence
  Synthetic Construct
guccccaggccuccc

SEQ ID NO: 2838 - RNA, 15 nt, Artificial Sequence
  Synthetic Construct
uguccccaggccucc

SEQ ID NO: 2839 - RNA, 15 nt, Artificial Sequence
  Synthetic Construct
cuguccccaggccuc

SEQ ID NO: 2840 - RNA, 15 nt, Artificial Sequence
  Synthetic Construct
gcuguccccaggccu

SEQ ID NO: 2841 - RNA, 15 nt, Artificial Sequence
  Synthetic Construct
ggcuguccccaggcc

SEQ ID NO: 2842 - RNA, 15 nt, Artificial Sequence
  Synthetic Construct
cggcuguccccaggc

SEQ ID NO: 2843 - RNA, 15 nt, Artificial Sequence
  Synthetic Construct
gcggcuguccccagg

SEQ ID NO: 2844 - RNA, 15 nt, Artificial Sequence
  Synthetic Construct
ggcggcuguccccag

SEQ ID NO: 2845 - RNA, 15 nt, Artificial Sequence
  Synthetic Construct
gggcggcugucccca

SEQ ID NO: 2846 - RNA, 15 nt, Artificial Sequence
  Synthetic Construct
agggcggcugucccc

SEQ ID NO: 2847 - RNA, 15 nt, Artificial Sequence
  Synthetic Construct
cagggcggcuguccc

SEQ ID NO: 2848 - RNA, 15 nt, Artificial Sequence
  Synthetic Construct
gcagggcggcugucc

SEQ ID NO: 2849 - RNA, 15 nt, Artificial Sequence
  Synthetic Construct
agcagggcggcuguc

SEQ ID NO: 2850 - RNA, 15 nt, Artificial Sequence
  Synthetic Construct
gagcagggcggcugu

SEQ ID NO: 2851 - RNA, 15 nt, Artificial Sequence
  Synthetic Construct
ugagcagggcggcug

SEQ ID NO: 2852 - RNA, 15 nt, Artificial Sequence
  Synthetic Construct
augagcagggcggcu

SEQ ID NO: 2853 - RNA, 15 nt, Artificial Sequence
  Synthetic Construct
aaugagcagggcggc

SEQ ID NO: 2854 - RNA, 15 nt, Artificial Sequence
  Synthetic Construct
caaugagcagggcgg

SEQ ID NO: 2855 - RNA, 15 nt, Artificial Sequence
  Synthetic Construct
ccaaugagcagggcg

SEQ ID NO: 2856 - RNA, 15 nt, Artificial Sequence
  Synthetic Construct
cccaaugagcagggc

SEQ ID NO: 2857 - RNA, 15 nt, Artificial Sequence
  Synthetic Construct
ccccaaugagcaggg

SEQ ID NO: 2858 - RNA, 15 nt, Artificial Sequence
  Synthetic Construct
accccaaugagcagg

SEQ ID NO: 2859 - RNA, 15 nt, Artificial Sequence
  Synthetic Construct
gaccccaaugagcag

SEQ ID NO: 2860 - RNA, 15 nt, Artificial Sequence
  Synthetic Construct
ugaccccaaugagca

SEQ ID NO: 2861 - RNA, 15 nt, Artificial Sequence
  Synthetic Construct
augaccccaaugagc

SEQ ID NO: 2862 - RNA, 15 nt, Artificial Sequence
  Synthetic Construct
gaugaccccaaugag

SEQ ID NO: 2863 - RNA, 15 nt, Artificial Sequence
  Synthetic Construct
agaugaccccaauga

SEQ ID NO: 2864 - RNA, 15 nt, Artificial Sequence
  Synthetic Construct
aagaugaccccaaug

SEQ ID NO: 2865 - RNA, 15 nt, Artificial Sequence
  Synthetic Construct
caagaugaccccaau

SEQ ID NO: 2866 - RNA, 15 nt, Artificial Sequence
  Synthetic Construct
acaagaugaccccaa

SEQ ID NO: 2867 - RNA, 15 nt, Artificial Sequence
  Synthetic Construct
cacaagaugacccca

SEQ ID NO: 2868 - RNA, 15 nt, Artificial Sequence
  Synthetic Construct
ccacaagaugacccc

SEQ ID NO: 2869 - RNA, 15 nt, Artificial Sequence
  Synthetic Construct
gccacaagaugaccc

SEQ ID NO: 2870 - RNA, 15 nt, Artificial Sequence
  Synthetic Construct
ugccacaagaugacc

SEQ ID NO: 2871 - RNA, 15 nt, Artificial Sequence
  Synthetic Construct
uugccacaagaugac

SEQ ID NO: 2872 - RNA, 15 nt, Artificial Sequence
  Synthetic Construct
uuugccacaagauga

SEQ ID NO: 2873 - RNA, 15 nt, Artificial Sequence
  Synthetic Construct
cuuugccacaagaug

SEQ ID NO: 2874 - RNA, 15 nt, Artificial Sequence
  Synthetic Construct
ccuuugccacaagau

SEQ ID NO: 2875 - RNA, 15 nt, Artificial Sequence
  Synthetic Construct
gccuuugccacaaga

SEQ ID NO: 2876 - RNA, 15 nt, Artificial Sequence
  Synthetic Construct
cgccuuugccacaag

SEQ ID NO: 2877 - RNA, 15 nt, Artificial Sequence
  Synthetic Construct
ccgccuuugccacaa

SEQ ID NO: 2878 - RNA, 15 nt, Artificial Sequence
  Synthetic Construct
gccgccuuugccaca

SEQ ID NO: 2879 - RNA, 15 nt, Artificial Sequence
  Synthetic Construct
ugccgccuuugccac

SEQ ID NO: 2880 - RNA, 15 nt, Artificial Sequence
  Synthetic Construct
uugccgccuuugcca

SEQ ID NO: 2881 - RNA, 15 nt, Artificial Sequence
  Synthetic Construct
guugccgccuuugcc

SEQ ID NO: 2882 - RNA, 15 nt, Artificial Sequence
  Synthetic Construct
cguugccgccuuugc

SEQ ID NO: 2883 - RNA, 15 nt, Artificial Sequence
  Synthetic Construct
gcguugccgccuuug

SEQ ID NO: 2884 - RNA, 15 nt, Artificial Sequence
  Synthetic Construct
ggcguugccgccuuu

SEQ ID NO: 2885 - RNA, 15 nt, Artificial Sequence
  Synthetic Construct
cggcguugccgccuu

SEQ ID NO: 2886 - RNA, 15 nt, Artificial Sequence
  Synthetic Construct
ucggcguugccgccu

SEQ ID NO: 2887 - RNA, 15 nt, Artificial Sequence
  Synthetic Construct
cucggcguugccgcc

SEQ ID NO: 2888 - RNA, 15 nt, Artificial Sequence
  Synthetic Construct
ccucggcguugccgc

SEQ ID NO: 2889 - RNA, 15 nt, Artificial Sequence
  Synthetic Construct
uccucggcguugccg

SEQ ID NO: 2890 - RNA, 15 nt, Artificial Sequence
  Synthetic Construct
cuccucggcguugcc

SEQ ID NO: 2891 - RNA, 15 nt, Artificial Sequence
  Synthetic Construct
ucuccucggcguugc

SEQ ID NO: 2892 - RNA, 15 nt, Artificial Sequence
  Synthetic Construct
cucuccucggcguug

SEQ ID NO: 2893 - RNA, 15 nt, Artificial Sequence
  Synthetic Construct
ccucuccucggcguu

SEQ ID NO: 2894 - RNA, 15 nt, Artificial Sequence
  Synthetic Construct
uccucuccucggcgu

SEQ ID NO: 2895 - RNA, 15 nt, Artificial Sequence
  Synthetic Construct
cuccucuccucggcg

SEQ ID NO: 2896 - RNA, 15 nt, Artificial Sequence
  Synthetic Construct
ucuccucuccucggc

SEQ ID NO: 2897 - RNA, 15 nt, Artificial Sequence
  Synthetic Construct
cucuccucuccucgg

SEQ ID NO: 2898 - DNA, 16 bp, Artificial Sequence
  Synthetic Construct
gcatgcatgcatgcat

SEQ ID NO: 2899 - DNA, 14 bp, Artificial Sequence
  Synthetic Construct
gcatgcatgcatgc

SEQ ID NO: 2900 - DNA, 14 bp, Artificial Sequence
  Synthetic Construct
gcatttgcagcagc

SEQ ID NO: 2901 - protein, 4 aa, Artificial Sequence
  Synthetic Construct
EGLD

SEQ ID NO: 2902 - protein, 16 aa, Artificial Sequence
  Synthetic Construct
EGFDKVREAEDSPQHM

SEQ ID NO: 2903 - DNA, 23 bp, Artificial Sequence
  Synthetic Construct
agctgctgtccccgctggcatgg

SEQ ID NO: 2904 - DNA, 23 bp, Artificial Sequence
  Synthetic Construct
tgggtgctcttacggtcccccgg

What is claimed is:

1. A method of modulating splicing of a Receptor for Advanced Glycation End products (RAGE) pre-mRNA, the method comprising contacting a plurality of cells with a splice modulating oligonucleotide (SMO) that specifically binds to a complementary sequence of a pre-mRNA that undergoes splicing to form mRNA encoding a RAGE protein, wherein the SMO alters the relative amounts of mRNA encoding soluble and membrane bound isoforms of RAGE protein produced by the pre-mRNA splicing.

2. The method of claim 1, wherein the SMO increases the amount of mRNA encoding a soluble isoform of RAGE protein produced.

3. The method of claim 1, wherein the SMO decreases the amount of mRNA encoding a membrane bound isoform of RAGE protein.

4. The method of claim 1, wherein the SMO directs read-through of the 5′ splice site of exon 9 of the RAGE pre-mRNA, resulting in inclusion of part or all of intron 9, or exclusion of exon 10, or any combination thereof, in the RAGE pre-mRNA.

5. The method of claim 1, wherein the plurality of cells is in vitro.

6. The method of claim 1, wherein the plurality of cells is in vivo.

7. The method of claim 1, wherein the SMO specifically binds to a complementary sequence of RAGE pre-mRNA in at least one of the group consisting of an exon, an intron, a 5′ UTR, a 3′ UTR, a splice junction, an exon:exon splice junction, an exonic splicing silencer (ESS), an exonic splicing enhancer (ESE), an intronic splicing silencer (ISS), and/or an intronic splicing enhancer (ISE) or a combination of any of the aforementioned in the RAGE pre-mRNA.

8. The method of claim 1, wherein the SMO produces at least a 5 percent increase in read-through of the 5′ splice site of exon 9, resulting in inclusion of part or all of intron 9, or exclusion of exon 10, or any combination thereof, in a RAGE mRNA, as compared to baseline untreated cells, and alters expression of RAGE or one or more isoforms thereof.

9. The method of claim 6, wherein the plurality of cells is in vivo and the SMO is administered to a subject to treat a disease or condition selected from the group consisting of Alzheimer's disease, amyotrophic lateral sclerosis, diabetes, glucose tolerance, diabetic allodynia and neuropathy, diabetic retinopathy, atherosclerosis (e.g., coronary artery disease and peripheral artery disease), diabetic nephropathy, diabetic wound healing, cardiovascular disease, heart failure, ischemia-reperfusion injury, immunological disease, autoimmune disease (e.g., multiple sclerosis, osteoarthritis, and rheumatoid arthritis), sepsis, transplant rejection, cancer (e.g., glioma, breast cancer, liver cancer), pain, liver disease (e.g., hepatitis and liver fibrosis), and lung disease (e.g., acute airway injury and respiratory distress syndrome, chronic obstructive pulmonary disease, emphysema, asthma, cystic fibrosis, and idiopathic pulmonary fibrosis).

10. A splice modulating oligonucleotide (SMO) comprising 10 to 200 nucleotides that are complementary to an exonic or intronic sequence within exon 9, intron 9, or exon 10 of a RAGE pre-mRNA and an optional one or two additional nucleotides.

11. The SMO of claim 10, wherein the SMO sequence comprises one of SEQ ID NOs: 5-2897 or a variant thereof having at least 90% sequence identity to the reference sequence.

12. The SMO of claim 10, wherein the SMO sequence comprises one of SEQ ID NOs. 5-2897.

13. The SMO of claim 10, wherein at least one nucleotide in the SMO comprises a non-naturally occurring modification comprising at least one of a chemical composition of phosphorothioate 2′-O-methyl, phosphorothioate 2′-MOE, locked nucleic acid (LNA) including thiol-LNA, a constrained moiety, including a constrained ethyl nucleic acid (cEt) or constrained methoxyethyl (cMOE), peptide nucleic acid (PNA), phosphorodiamidate morpholino (PMO), cholesterol, GalNAc or any combination thereof.

14. (canceled)

15. A pharmaceutical composition comprising an SMO of claim 10 and a pharmaceutically acceptable carrier or diluent.

16. A method of treating or preventing a disease or condition in a subject that would benefit from altered splicing of RAGE pre-mRNA, the method comprising administering to the subject an SMO of claim 10 or a pharmaceutical composition comprising the SMO.

17. The method of claim 16, wherein the disease or condition is selected from the group consisting of Alzheimer's disease, amyotrophic lateral sclerosis, diabetes, glucose tolerance, diabetic allodynia and neuropathy, diabetic retinopathy, atherosclerosis (e.g., coronary artery disease and peripheral artery disease), diabetic nephropathy, diabetic wound healing, cardiovascular disease, heart failure, ischemia-reperfusion injury, immunological disease, autoimmune disease (e.g., multiple sclerosis, osteoarthritis, and rheumatoid arthritis), sepsis, transplant rejection, cancer (e.g., glioma, breast cancer, liver cancer), pain, liver disease (e.g., hepatitis and liver fibrosis), and lung disease (e.g., acute airway injury and respiratory distress syndrome, chronic obstructive pulmonary disease, emphysema, asthma, cystic fibrosis, and idiopathic pulmonary fibrosis).

18. The method of claim 1, wherein the SMO is an SMO comprising 10 to 100 nucleotides that are complementary to an exonic or intronic sequence within exon 9, intron 9, or exon 10 of a RAGE pre-mRNA and an optional one or two additional nucleotides.

19. A non-human animal comprising a gene encoding human RAGE.

20. The non-human animal of claim 19, wherein:
(a) the non-human animal is a mouse;
(b) the gene encoding human RAGE has been introduced into the genome of the non-human animal;
(c) the gene encoding RAGE of the non-human animal has been edited out, knocked out, and/or replaced with the gene encoding human RAGE;
(d) the gene encoding human RAGE is a genomic sequence, encoding exons and introns;
(e) the gene encoding human RAGE is under control of the endogenous RAGE promoter of the non-human animal;
(f) the non-human animal comprises a disease-related mutation, which optionally is in a gene encoding presenilin, SOD1, or the cystic fibrosis membrane transporter (CFTR); or
(g) is an inducible disease model, which optionally is an inducible disease model of a disease selected from the group consisting of Alzheimer's disease, amyotrophic lateral sclerosis, diabetes, glucose tolerance, diabetic allodynia and neuropathy, diabetic retinopathy, atherosclerosis, diabetic nephropathy, diabetic wound healing, cardiovascular disease, heart failure, ischemia-reperfusion injury, immunological disease, autoimmune disease, sepsis, transplant rejection, cancer, pain, liver disease, and lung disease, and optionally effects on physiology or disease are assessed.

21-28. (canceled)

29. A method for identifying or characterizing an SMO directed against human RAGE pre-mRNA, the method comprising introducing an SMO into a non-human animal of claim 19 and assessing the effects of the SMO on the non-human animal, wherein optionally effects on splicing of RAGE pre-mRNA are assessed; the non-human animal is a disease model and a feature of the disease is assessed; or the SMO comprises a sequence selected from SEQ ID NOs: 5-2897.

30-32. (canceled)
